United States Patent Application Publication US 2026/0191916 A1 - sequence listing, part 30

SEQ ID NO: 84 - DNA, 6529552 bp, Bacteroides ovatus (residues 4,353,037-6,529,552 of 6,529,552)
  source 1..6529552: mol_type = genomic DNA
aaacctaactgccgcccggaagaagtttacgagatggttttcgacttgatgttcagcttgaacgcaacggaagatcagctggacttccccgtgatttacggttccgccaagaacaactggatgagcaccgactggaagcaacagactgacagtattactccgctactggattgtatcatcgaaaatattccggcacccaaacaattggaaggtactccccagatgttgattacttctctggattattcttcttataccggtcgtatcgctgtaggccgcgtacatcgcggtacattaaaagaaggtatgaatataacgcttgcgaaacgtaacggtgatatgctcaagagcaaaatcaaagagctccatgttttcgaaggtttaggccgcgtgaaaacaaacgaagtttcttccggtgacatctgcgcactggtaggtatcgacggtttcgaaattggagatactgtttgtgatttcgagaatccggaagcattgccgccaatcgcaatcgacgaaccgaccatgagtatgctgtttgctatcaacgattctcctttcttcggtaaagatggcaagtttgtgacttcacgtcatatccacgaccgtctgatgaaggagctcgacaagaatctggctctccgcgtaagaaaaagtgaagaagacggtaaatggattgtttccggccgtggcgtactccacctttctgtattaattgaaacaatgcgccgagagggatatgaattgcaggtaggtcagccgcaggttatcttcagagaaatcgacggtgtgaaatgcgagccgattgaagaactgaccatcaacgtaccggaagaatattccagcaaaattatagatatggttactcgccgtaaaggtgaaatggtcaagatggaaaatacaggtgaacgtatcaatcttgagttcaatatgccttcacgcggtatcatcggtttgcgtaccaatgtactgactgcctctgccggcgaagccatcatggcacaccgcttcaaagaatatcaaccgcacaaaggagaaatcgaacgtcgtaccaatggttctatgattgctatggaaagcggaacagcttttgcttatgccattgacaaattacaggatcgcggtaagttctttatcttcccgcaggacgaagtctatgcaggacaagtagtaggcgaacactctcatgacaacgacctggttatcaacgtaaccaaatcgaagaagttgacgaatatgcgtgcttccggttcggatgataaagtacgcctgattccacctatccagttctcacttgaagaagcactggaatatattaaggaagatgaatatgtagaagttactcctaaagcaatgcgtatgcgtaaagtgattttggacgaaatcgaacgtaaacgtgcaaacaagaactaactattctttcataatattataaaagagcccccggttaaacacagtgttcaaccggggggctctttttcccataagtatactaatacaacagtaatcctaccacacccgccagacaaatcaacagaatagggtgaagattccatttccatgtaaccaaaaaggcggctgcgaaaataccgatacttttatagtctataaaattctctctattcatcataagtaatgcagccgaagcaatcagcgcgaccgacataggaagcagtccggacatagccgctttaatatacttattatccttacacttcgcaaagaaataagaaattagcaacaccaaaataaaagaaggcaagcaaacggctacagtggccaacacagcgccccaaacactttgtgttaccgcataacctacgtaagtagcactatttatgccaatcggtcccggagtcatctgcgaaattgcgaccacatccgtaaactgttgaggagtcagccaatgatgaagatccactatttcatgttgaatcagggaaagcatcgcatatccacccccaaaaccgaacatacctattttaagatacacccaaagtaattgccaatatatcatacctgtttattcgctattttttctttcaaccataatgtatataccaatccccctataattccggccaccacaatataaataggtgataagccgaactgccagatcaacacggtagctatggcaggagcaatcaactgaaaacacttcagtttcaaagctctaacagcagaaatgcaaggaaacagaatcaatgctaccacggcaggacgtattccattaaagatacgaatcatcacttcattatcctgaaactgtgcaaaaaacatggctatcagcatcatgataacgaaagagggaagaatcgtagccaatgcacacaccaggctaccacccaccttatacaacttatatcctacaaaaatagaaatattcacagcaaacacacccggaagcgactgcgtcaaagcaaacatctccataaattcttccttattcatccattgcttgttaacaatctcccgttcaatcaacggaatcatggcataaccgccaccaatagtaaacatcccaatctttgcaaatgtcacgaataattttaaatactccagtaccatcctttctttctaattttccgatattttgtgtttaatttttaataagccctttggctgcatcatatccaatctgataactgcgtcctttcactgttttaaaggagatagtctgatccaaatactttatgacacagttgcctcctgcattagagcgtacaacagcttctttcaactgatgattctcccagatcatatccacctcaaaatttccttttgcacagataccactgatagaaccgtctttccatgcatccggcaaagccggtaataattgaataaaacccatgtgactttggagcaacatttcggtgattcccgctgtcccgccaaagtttccatcaatctggaaaggcggatgcgtatcccacaaattatccatggttccgttcttcaataaattgccgaataaagtataagcatgattaccatcctgcaaacgcgcccactgattcaacttccaacccatactccaaccggtagcaccatcaccacgatgcaccaataccactttagcagctttcgccagttcgggagtagtgaccggagaaacagtatgtcccggatgcaggccgaacagatgattcacatgacgatgttcatctttcggatcatcaatatccaccgaccattccatcaactgaccataacgacctatttgatagggaacgagattggcaagcacatgctcccattgcttacgttctttcttatctacacccaacactttgcttgcttcaatcgcatccatcagaatttcacgcactacggcatgcacaaaagtagctccctgatcgataggaccatgctcgggcgaagtggacggagcagccgtataggttccatccggcttatgccacaggtaatcgactgcaaaatccgcactactctttattagttcatagccggtttctttcagaaatttcaagtctcttgtatagtcgtaatactcccatatatgagtagccagccagggacctgccatcggattgaagttccacgacatatcctgactttccaacggagtggtaaagccgaaaatattgccggagatagatgccgtccatcctcttgctccgaaataagcttgtgcagtcttctcccccggtttcaccagtgtacggataaagtcaatcaacggaagcacgcactcattcaagttggtagaacaagcaggccaataattcatctggatattgatgttattatgataatccacacgccacggtccatcgacattattgtgccaaatcccctgtagattagcaggcatattgcccggacgggaactggcaatcagaagataacgtccaaattgataatacaactcttccagataataatccggctgtcctttccgataatttttcagacgttgggaagtaggcagattcactcctttcaccgctgggttcagattcagccgaacccggttgaacagagtagcataatcattataatgttgattgaataaagctgtatatccctgcgccactgcattattcatccactgctttgtcgtttcttcgggattaacgcctatatatgttttcggatctttgaaatccggatcaaagttaatcttatagtcagtgtccgctgtgatataaaatacaacttcgtctgcatccttcaccgtcaactttccatctgcattagacagtgttcctccttttgtttctgcctggatgcgcacaacatacttcattccattattatccaaagaagctgtgtaaaccagtcctttatttccatcagaaaccatgctgccggtagacaggggattgggcgcataactgaaaaccagattttgtttccccgattgatccgcgctgaaacgtaccaccattacattggcggggtaagagataaaaaaattgcgttgataagccacacgatcctttttgaattgtacgactgccatagccgaatccaaagaaagaatgcgcttataatcgctcattcctatcatattcagtccggtttctacataaaactctcccattgtagtaaagctactgaaacggaaaggattttctccgtcagcttcatacgacacttcactattgaagttctgtcgcgttagcatttcagcctttttctgatctccctctgtaaatgctttgcgtatttcatctaaaagatgggccgattgtttattgacattccaataatagtccgcacctttcgctgtgttcggaccaccgcgccaaagcgttttttcattgaaagtgatacgttcggcttccaccgatcccataatatttgcgccgaggctaccgttaccaataggcaatgactgtgactcccaactggcatccagattatgtccgcttcctgctgttaccggtttattttcatctttccacaaatccggtcttccgccataccaggcagcatatccctgcaaagtattcggagtatcaaaccagatggaaagtccttgagtataatctgtttctcccgcataaagcccggaggtaaggaatagggaactaataagaaggaaataaaaattcttcatggtcgtcgcgtcgttatttaagattaataacctatttatagtctgtacaaaagtagtcaaaatatatatctaataaaaataaaacagaatctcaacaacctctataatgaggtaaaattacatcaaaccatccgacagtatttttttcacgacccaatacccgactctggcctctgaaatccctgacaacaaccgatgaggacagacaaacgcatcatcaataatttctgcttccatataataaaagcaacaggaagaatccttttcaaaggctttcgcatattccaaaatatgtgtcgatatcaagaaatgacaatgagagaagcttttcagtaattcattgacggcaacggaggcttcaaacgcatctttagcattcgtcccgcgaaacatctcatctaataccaccaaacagcgttttccggtcacagctttttgcatcacttctttaatacggagtacttccgccataaaatgacttcgtccgtcccgcaaagaatccggcagattaatagaggtataaatcccctcgtaaagaggacaaatcattgatttcacaggaacaggcaaaccgcaatgtgccaaccagacagccaaggtcaatgcctttaaagttgttgactttcccgccatattagagcctgtaaaaatgcatatatttccccgggacatctgccaactgtttggctgcgcatctttcacaaaaggatgaacgactccctccaccgagaagtccattgtcggtaccattatcggcatacaacagaagttcttctcttttgccacccggtgagctgtacggcagacatcaagtagatatataacagacagaagttccttcaaagataacaaccgagtacaccggaacagataatcgaatttgtctatgacaaagttagatagtcgtttttcctcatcagaggtctgctccaatacttcctccaattcacttccatggagaatattatcaatcatagcagcagattctttcatgagttgcggggcgccctgtggtagttctgtcgcccattccttcagacaatgcaagagatgaaccactaatttcacccctctgcagatcacataacgggtcgaatcatatcgcaccagacggtcgataacagtagcacatgaaagtaaaatatgagcttcccgtatctggtcacgataagccaggtaatactcaataaaatccagctcttcttcattcaaaagaagttcgggcaaagcatcccagacaatagcctcctgtcttttacggatttcccccaaatcacttagcggatacataatccagttcaacatcagcgcttttccttcttttgtctctgttttggaaaacaaagagaaaagaaattgctcattattagcagtctctgtaatgcttagatccgcataggtctgtttgtcagtagctagatataccataaccgcctttaaaggttagtactcctgttttggcaaatatagggaaaagttttaaacaaacagcatttattctcatagaaaggcacaggcataaacaaaaaaggcggttcgaaatcgaaccgccttccatattatatctgattctccaattagagtttcggaccagcagcaaccaaagccttaccagcttcgttaccagtaaatttagcgaagttcttgatgaaacgtccagccaaatctttagctttttcttcccattggcaagcacattcgtaagtgtcgcgtgggtcaaggatcttcggatcaacacccggaagttctgtaggaacaacaaagtcgaagaaaggaataaccttagtaggagctttgtcaatagaaccatcaaggatagcatcgatgataccacgagtatctttgatagagatacgtttgccggaaccattccatccagtgttaaccaagtatgctttagcaccagtcatctccatcttcttaaccagttcttctgcatatttagtcggatgcaatgacaagaaagcagcaccgaagcaagcagagaatgtcggagtcggttcagtgataccacgttctgtaccagccaatttagctgtaaatccagacaagaagtagtattgagcctgtgccgggttcaagatagatactggaggcaatacaccgaatgcatcagcagacaagaagataacttgttttgcgtgaggacctttagacaccggtttaacgatgttttcgatgtgatagataggataagaaacacgagtgttttcagtcacgctcttatctgtgaaatcaatcttaccgttagcatcaacagttacgttttcaagtaaagcgtcacgtttgatagcattgtagatatccggttcactttctttatccaggttgataaccttagcgtagcaaccaccttcgtagttgaatacaccttcgttatcccatccgtgttcgtcgtcaccgatcaatttacgtttcgggtcagtagacaaagtagtcttacctgtaccagacagaccgaagaagatagcagagctagttccttccatatcggtgttagcagagcagtgcatagaagcgataccacgaagcgggttcatgtagttcatgatagagaacatacctttcttcatttcaccaccgtaccaagtattcaggattacttgttctttagtcttcaggttgaatactgtagcagtttcagagttcaagcccagttctttgtagttgtcaacttttgctttagaagcattgaaacatacgaaatcaggttctccgtagttagcaagttcttcagcagtcgggcggatgaacatgttagttacgaagtgagcctgccaagctacttccatgatgaaacgtactttcatacgagtagcttcgttagcaccacagaaagtatcaacaacgaacaaacgtttgccggaaagttgttttacagctttagctttcaagtcagcccaagcttcttcagtacatggtttgttgtcgtttttgtaatcttcagaagtccaccatacagaatcagcagaagcttcattcttaacgaagaatttatctttaggagaacgaccggtatagatacctgtcatcacgttcacagcgcctaattcagttacttgacctttttcaaagccttccagactcggttttgtttcttcagcgaacaaaacatcataagacggattgtgcaaaatctcggtcacacctgtgatgccgtacttgcttaaatctaaatttgccattttctttgaattaattaaaattggtattttgttttctatctcttttcaccttaacatggggagctttggatagccccttgtaaatccggctacaaaagtaatactttctttggaaaggaagaaggtattagagaaatttttccctaattgaaactcttttataaattcctaacaatatctgcaaactgaatattgcaatttgaaagattatcgtttactttgcaagtcagtatgctagcaatgctgtgaaaatgagattaaaatctgattaaaatataatatgaaagtaattgattttggccaaactaattcgattctaaaccagtacatatccgaaattagaaatgtagaagttcagaacgaccgcctgcgtttccgccgtaacatagaacggatcggagaaatcatggcttatgaaatgagtaaagagtttaaatactcggtaaagaacatccagacaccactgggaatcgctccggtcagtacaccggacaacaatttagtaatcagtacgatcctgcgtgcaggtcttcctttccatcaaggtttccttagttatttcgacggagcggagaatgcgtttgtttccgcttaccgcaaatataaagatacgctaaaattcgatatacacatagaatatatcgcttctccccgcattgatgacaaaacgctgattatcaccgaccctatgctggcaacaggagggagtatggaacttagttaccaggcaatgctgaccaaaggccacccggccgaaattcatgttgcttcgattatcgccagccaaaaggctatcgatcatataaagaatgtatttccggaagacaagacgacaatctggtgcgctgccatcgatcctgaaatcaacgaacattcttacattgttccgggactgggcgatgcaggcgatcttgcctacggcgaaaaagaataaacgtttaaagattcttccgatattgctgcggtgaaaccccaacctgcttcttaaagaacgtaccgaaataagaagcattagggaagccgaaggcatttgaaatctcctgaatatctttctgcgtatttttaagcaatgagatgctcttacgaatgatagctttgaatacaagttcctgcacggtatatccgcaaatactcttagaaacggcagaaagatatttaggagacaaacacaatttatccgcataaaactcaacaccccgttcctgcatataatatttttcgattaactggatcaagtgaataaagacttcatttttgcgtcctcccacttcccgcccgtcattgacgagtttgcgattataaatagagcaaatcctgtacgtcaatgcaagtagaagtaatttctgctcataaagtttaaatgaattttcttccgactgtaacacattgtccaataaggacatatactttacaatctcttcttcctcaccagtagaccatacacaagaaggttcttcgggagtaaggcgggaatacatatacatggaaacaaccagattccccataatatcccggatcggttctatctgatagatcaaaatccgcacctccatgtcttccgactcttgcaaaacctgaaactcgccgtcttcgggaataaacaaactttcgcctgctcctgcgaaatgctttttctgattaagcgaaaactggaaattaccctggcggcaaataatcagccccagtcctttcatttgaaaaggtttcttcagtgagggtggaaaatttacaaatatcccttcggaactacatatatttttcccacttaataaatcgcgatcaaactgcaataaacgatcttgtccgctatccatcatactaatatattaacagatcattatcaaaaacgacgctaagttagcaattttcgtttaggataaggaacaacgagcacaaatatcatacaaattaacccaccataaattgtccatcccgccatctctttgagtgcagagagcgtggcctgcacctgaatacgccctttggtagatatagcagccatgttacgggcttccgtctcactctttccctgatatttcataccctgtaccgtaccaaggaaggaagtggaagcatccggattaagcaggtccacattttgcgcataacgggttatatagtgttgttgccgctcttgcaaaacatttgtataaattgctccgccaatactcggtcccacaaccatacgcacagtaagcataatacagatccaggtggaaagatatttaaaaggcatacgttgattggcataagcagccgtcagcgcatacagaatcatcatgcctatggcacggatgataactgcatatttcagacgctcgtaaactcctgctgtctgcacctcgaaatacatgaaaacagctgataaagacaggaagaagaatcccatcgcaaacagatacttaaaatgtaaccccttacctcccaacaccatagcaatcacggcgccaatagcataacctaccatacaccaattacctaatgaagcattttgcagattatcgagatgcatccccactcctgcaaacacattgacaaacatagcactggagtttatcaccatcaataataagtaaagtaatgctcccatacgtatagtacgcagtttgaacgcatccagcaaaacataaggcgaccggcgcgttacgtccatatatagaaaaattcccgcaaaaagaatacttacagctgtcgcccaacgaatagattcgtcatcataccagtcgagtacttttccataaaccagcacatacgtgagacaagtcagcgagatgcaaaatgcagtgacattgccgaacttacggaaattaataggaaaccttccgggaaacttataattcggcatggtaataaacaagagcaaaatagagatcaggagaatccccatcataaagtaatacacatatttccactcatattcaaaggacagccaagccgtcaatgctgtgcccgactgtcccagaatcataaaaaacagataaacagccggctgactcacacatctttcaatgtccaatttattccaaccggcagtatctttcggctccaaccccggagtaatattgcgggtagcttccattccacccgcataccaaatgagtgtgaacagattgaccatcatcagtaccatacgcaagaaacccgtcagaagactacaaagcgccaacagaaaaacgctgtctgtctttgcacagatataactgaatatatacatgaacgcaaacccgacaatacacatcatcttctcccgccgtacacacaccaactgatataggaaaggagcaaaggctgccataccaatagaagtaacaaagttggcaaactggatatgctcggatattatgccaagcccgctcatcatttcggtgctattcaccgaataaaccccgcctaccgtaagaatcggcagaaagaaaaataacagaatgataatacccaacggcttgggcatccaaccatagaaaggataatttttaggataagagggcatcggactaattaaaaatataaattaaaaattataaggcactgtatatagacagaagaggcggagggattagagtctggctttcactactaccatcatgcctgctgctaaccgttcgttatcttctttcgataaatcggtgaaatcgattcgtacgggaatacgttgctgaatcttcacaaaattacctgccgaattatccgtcggcactaatgaatatttagacccggtagctcctgatatagaggtgactttgcctttaaactctttatcgctaatggcatctactgtgacaaatacttcctgtccgatatgcaggttctcgatttgtgtctccttataattggcaacgatccatttctgggtatcaggaagaatataggtgatggtctgccctgccgaaataaactgtccttcctctaatgaacgacggccgagttttccgtcacaaggagctattacaaccgtataggaaagattcaaccaagccatttcgagcgcagctgttgctctttgaatagccgcttcggtattcatgcgacggtaggacacttcatctacaccggaaagagctgcttttttctgccttttcgtagcttccaacttcttacgcgtagcttcataatcagtgacaatctgttcaagttggataggagtagccgcatttcgtttcacgaggttctcatatcgtttccggtctttttccagtttcgccaaccgtacttcaatctcggcaatagacgcatcgtaaacagatgctgttgtctgcgtggtattgagtgtagcattgatgacggtcgcaccggcttgcgcatccttcaaggcagcttcagcctccattacgcgaattttatattcacgatcatccagtaccagcaaagtatctcctttatgtacctcctgatgttctgtaaagtagattttgtcaatgtaacctgaagcacgtagattgataggagacacatattgttctatttgtgcatcgttactagtctccgtctggctataattcaaaaaaaggcagatcacttcaatcactccccaaacaataatagccactccgaaaaggctgatagcaatctgccagcgacgaagtttcttcattttttttgctttctcctgatgagtagcggaaggaaggttattttccattgtttccatatttatgattgttatttgcgtattatttgactaatgattctatttgtccggttagtttaagcagcatcaggttagtcacccgatagttataatgtgcgctgatatagttgttttgagcttcgctcatctgcatttcatcttgcagcacttccgtcatagaagcaatgccttcccggtaacggtcggaagtgactgcgtacacatcttcggcaagcaagtagttatccttctgtttcttaaagttacgctgattgttcatcaggtcgttcacagcattcagatattgagtttgcagattcttccgggcatcttcccatgccagccttttgttctctatatcgatcatcgccttctttattttataggttttatccagtccgtcgaaaatcggaatacgcaaggttagccccactccataggaacgaaaccattgattggacggaccggagtggaaccaatgataacctttatccgtatatgcggcatatcgccagctgcctgtcagactaagagaagggatatatccattagtaatgatcttcttttgtcgttccgccagttgcacttgcgattgtgagagttgaagttcatagatattttccgacaagccggtcagggctaccgtagtaatgctatcggtatttaccggtgtcagcgcgatttccttttcagccggataatccataatgtatttcagcatattcaattgctgtttcatcattgcttgtgcattgtcatattgcaccttcagattttccaaattgatattgactcttttcagatcgacttccatagacattccattatcgaagaaagcctgtgtaatatctctcaattcttccagacgggtgatatttgcttttatcagcatgatttgttcggccgtgacctgtccgagataatacatcttactgatttgaagaataacatcttccctggcttttccataagacagacgactgatttcttccatcactttagctatggacatagaagtataaagagtctgattgaaaagcggcatctgcatttccagtcctgcattagcagaatgttgcaatgttttcgttatattatagggaactccgtaagatgaaccgtctgtgactgacaccggaggatcaaaattgttattataaccggctatcgcattaatttgcggcagcaacttcgaacggttttcagatacgccatatttacttttttgtatttctttacgtttcccttctaacgacaagttattgtcaataccaatgcggaggcaatcctctaatgtcagaatctctacctcctgtgtttttccgtttaacacgaacaagaaaaaaaaggaaaaaatgaatagtagtcttttcataatatatgctctattattggctacaaatttagcagcttatagcataatgagactatccacaaactatttgtttatattcatattttcctttttcaatgggtaaatgaatggacagtcactctcatagataaaaacaagaatcctctttcaacctatcacctatattatcaaaccctttattcatcgtattttcagaatggtaataggttactgttgtagtttcaaggcggggaaccttcctccaccccaaagcataatagcataaacccatcggacgaagaaaagtcaggcatttgatagacaaatctccacccttagtcgattttatttttatctgctccagtatctacttagctttgagatattaaaacaaataaaagcagtaagagaaatgagaaaaaacatgaaattgataggattggcagtcagcttaacatgctgtgcaggttttatagatgcacaagaagccaataatgagccgcaagaaaggcagcaacaagaaaagcatcttccacgcgaagttctgaatccagagaaggtagcaacccagatgacagagcaaatgaataagttgctccaactgacagataaacaatataagaaaatatataagctgaacctgaaagagcaaaaagcatttttcaaggctatgcaaaattcggatgactatcgcccaccaatgggagaaggtcccggtatgcggggaggacgtccgccaatgggtggaggccaaccgccaatgatgggagaaggtggtttcccgggcagaatgggaggtggtccgatgatgagcagagataccaattctgccgactcacaaaagaaagccgcagaaaccaaagaaaagaaaataaaaaagattctgacaaaagagcagtatgagaaatggcagaccgaacaaaattccgcacgtaaaaaagcttctcaaagaagaatgcacaaagataatcatcctgacaagggtccggactttgaacaaaaaagcttctaaatatcacacttaatatgtttctatgaataatagcgtttgtttttcataatttttttagtgaatgtaaagtagcggctctcttcgcgaggaagagagccgcccttatttaataaccttatgatacacaacaggtttacgtactattttatttcgcttaggacttcttcgctatcttgctccgctgcgtccacgcaagaagcataactccgattaacaataaagccaatgctgcataagcaatactttccgtgacatgtatgctttgcggatcaaaccacatctcgatggtatgttcccctgccggcatatttatcgcacgcaagatatagtctgcacgggcaatatccaccggctggccatcgatagtcacctgccatcccggataatatatttcagagaaaacaacaactccgtctttaggagtggaggccttataaaccaaacgatttggctcgtaactggttaactggatggtagatagtgaatctttatatccttctgtcacacctttcagctgttctttaaactttacatccactacggctgtttccgttggaagaatatcgttcaaagcatctatttcttcatttgcattatttacatactgcaccttatctacgaaccatgcattaccgtatgcataaggattcatgacaggaacagcctgcccttgctctccggcagggaaaatgaagtatttggtattcagcatattcagtacacggaatttagaagcatccacactgtccatctgtccaccggcagtagccacagcctgataagtttctttcatttcgggcacgatgtgatggtctatcatttcctgatagcggcgaagtttcgctgcatgatagccaccgacactcttatgccaatatgctgtattgttttcattaaatgtattaccggggaaaccgatgaaattcagtacacgataattcggagtcgtatcctgaagaataatctcatccgcctgtgttttcacgaatgcttctgaccgcttcgacttcggcacgaactgttcgtcattcaaatagcgtttattgacactccacatatctatcagacacaaaagcgcaatacccgccagtgtgaaagaggctttcaacttccgcagttgatacaagaataagaacaggcaaccgatcactataataaagaagctgcgccatgcatccgaagcaataatggcttcgcgcatttcagtcagattggccacaaacgaagccaaatgttcggcaggaagtgcttgtttcaaagcagtcatctcctgtgccgttataaagctggagaagaaagcgcccggggcgacagctaaaatgaacgcaacaccggcagttagtaccaacgcagcaatcactcctctacagttcttttcctgtttcagcatatccggtttactcaaaatctctttcaaggcaaaaatcgccaacaaaggtattgtaaattcagctattaccagaatagaagatacagcgcggaacttattatacatcgggacataatcgataaagaagtccgtcagccccatgaaattctttccccatgaaagcagaatcgagaagatagtagctcccagcagcgcccatttaagaggacctttcactataaagcaccccaatacaaagaggaacatcacaaatgcccccacatataccggaccggctgtccacggctgctcaccgaaatattgaggtaactgtgagtaaataccgttatacattggattggcctttgccatagcagcttcgctctgtgacatcgtagatcctgatcctcccccctttacattcggaaccagcaacgtcaacgtttcaccgataccataactccagttggttatataatcacgatccaatccgctactagtctgactggcagcagctccctcctgcttcaattcactcttgccgcgcatcgtctccttactatattcatacgtatgatacagattggaaatattgatgcagactcctaccacggcagccagtgctaaaaccccgctagccttgaagaaatgaggcaattctttctttctataagcatcttcaaagtaagctcctacaaaaaacaggatcacaaacatgaaataatagctcatctgaatgtgattcgactgaatctgaagggcgatgaacagggccgtaacgattccgcccaacaggtatttcttccggtaagccagaacgacacctgcaatcgtaggtggtatataagccaatgtcacaaacttccaaatatgccctgccggtatcagaatgaagaaataggaagagaatgcccatatcactccgcctaatcctgccagccaggccgatattccaaacgcccgcaagaggatatagaatcccagcatcatgataaaagtcagcactacataatccgggagaaagaggcgataaaccttctccacccctttcagggacgttgtcgagtcgtaactcggagacatctgataagtaggcatacctccaaaaatcgagtttgtccagcgcgtacgttctccggtacgctcgagatactctttcgattcttgtcctgcaccgactccggcagccgtgtcatgctgaaacaagatacgaccttcgatatcagccggaaaaaaataggcgaaagaaagaatgataaaagccagaatggctattaagtcaggaagaaactttttcatttacgatgacacgatttactatttacgattgaagtttgaatataaaaataaatacgaccggacaatctaacatttacaattgataacagtggaatatcgatctccctcatttatcaatcgtaaatggtaaatcgtctaatcgtaaatcaaattagtatctataatgatctgctttataaggtccgtccaccgatacaccaatataagcggcctgttcgggagtcagcttagtcagtttcacaccgatcttttcaagatgcaggcgagccacttcctcgtccagatgcttcggcaagcgatatacattgatatcatatttcttgttgaacagttctatctgcgccaatgtctgattggtaaatgaattactcatcacgaatgacgggtgtcctgttgcacatcccagatttaccagacggccgtcggccaacaagataatgctatgtccatccgggaaataataacggtctacctgcggtttgatattcacacatttgatgcccggataatgtttcaaagcatctacctgaatttcattatcaaaatggccgatgttgcaaacgatagcctggtctttcattttctccatgtggtcgatacggataatatcgatattacctgtcgtagtcacgaagatgttaccttccagacaagcctcttccatcgtcactacttcgaaaccttccattgcagcctgcagtgcacagatcgggtctacctccgtcacgagcacccgcgctccataagaacgcatggagtgagaacagcctttacccacatcaccataaccgcataccactactacttttccggcaatcatcacatctgttgcacgcttgattccgtcggccaacgattcgcggcaaccgtacagattatcaaacttagatttcgttaccgagtcgtttacattgaatgccgggaacagcaatttgccttcttcctgcatctgatacaaacggtgtacgcctgtcgtagtctcttcagatacgccacgcacttcttccgctacacgatgccagcgagtactgtcttctgccaacactttcttcaagatagcattcagttctatttcatcctccgcgtgtacttccttatccaatacggcagcattattttcagcatcataacccacgtggatcatcattgttgcgtcaccgccatcatctacaatcacattcggtcccttaccgccgtcaaagctcaatgcctgcaacgtgcaccaccaataatcggcaagagtctcgcccttccatgcaaataccggtacaccggcagcagctatcgcagcagcagcatgatcctgcgttgaatatatattacaagagcaccaacgtacttcagctcctaaagccactaatgtttcaatcagcacagccgtttgaatggtcatgtgcaacgaccccataatgcgggcaccttttaacggtttggattctccatacttttcgcgaagagccatcaggccgggcatttctttttctgccaaatcgatttccttgcgtccgaaatcagcaagtgtaatatctgccaccttatagggcagagtagagaataattctgtagacatattgtaaatcatttatatataatggatgcaaagatagaacattctgattagtagggcaaaagctatccgttttttttatattataataactagggaggctgtcagcatctcggaatattgttttatatttgcaacagataaaacaacttctacaacattctaatgaataataacgaatcttctatgagaaattacgaaaacaaaacaaaggaggatcttttggaaataatcgaacaattagagaagaaaatagattttctttcctctcattcttcttctgattcttcctctccttccaaagaacgttttcgtgataaatatagtacccggatactggatgctcttcctgacatgctcaccgtcttcgaccatgacgccaatattatagagcttgcttcttctccggcaactaatcacgtagaaggtatcagccccaacaatatcactaccactaacgtaaaagacattctgcccaaagaggcttatgaaagtgtccgcaagaatatggataaggtgattctcacaggagaaagttcaacagccagacacgatcttatgttggatggtgttttacatcactacgaaaaccgtatctttcctttggataaagagtatctgttgtgtatgtgccgtgatatatcccaacaatgggaggcggaacagacgaatgcccagcaacagaaagaactaaaggctgccagaatcaaagcggaagagtcggaccgattgaaatctgcttttctggcaaacatgagtcatgaaatacgtaccccgctcaatgccattgtaggattctccaaactaatcacttacgcaacatctgcagaagagaagaatcaatattcggaaatcatcgaacgaaattcggaaatgctgctgaatctattcaatgatattctggatctggcatcacttgaagctgattctctaaaattcaatatccgcccgatcaaattaatagatatctgcctgcagctggaacaacaattctgtcataagacgcaaaacggtgtcaaacttattctggacgacgtagatgcggacatgtatacttcgggagactggaatcgcatcatacaaattataagtaacttgcttagtaacgctacgaagtttaccccgaaaggagaaattcatttcggatatcgggaaaaggaggattttgtagagttctacgttaaagatagcggcatcggcattccggcagcaagaattgccacaattttccggcgctttggaaaggtcgacgattttgttcagggaacaggattgggattaactctttgcagaatgttagtagagaagatgggtggacgtatctggttgcgctctcaggaaggccagggaagcagattctattttaccctgcctttggttcgtcaataaagatcgattaaggacacaaatatcagtgtccgggcatgaccttacaggacttttacaattaaatatagatatacagaaaacgcggcttgttggtaacaaagccgcgttttccgcatatatctatgttcgaaatatattcatttattccttagcagccggagcactaagcatttctttatatttcaccggatcattcagaattttcattgcttccttcaaaccgtcatcatccttcaactgctggatgatattaccacgttggtaatagtaacgcttgataatttcagtagcaatcatcttctttatatcagatgagaaataatccaagtcgcgatcaagatcatggttcaacttcttttcaagtgctttgaactcctctgaagcatcatccatatacccttcaaactcggcagcttctttcaacgttttcagaattttctcactctgttggtcatacttgaagtcggctttcttcaccaatgctttaaaatcattataatcggcatctgtcacctcaaactcctccggagcaacgatggtaggatgtttcaaacaatactgagttgcataatcaaaaatcagattatcgcgtaccagatagaagaggatattcggtaatttctcctgtttgataacaatatccggcattacaccacctccgtcgcgtacttcacgtccggcagccgtatggaataccttagtcaaactgtcaggaatggttcctacacttccatcttcattacgatgcttgtagtcaatagcctgtacacaacgtccacttggaatataatatttggaggtagtcactttcatcgttccgccataaggcaaagagcggggaacctgtaccagtccttttccgaaggtacggttaccaacgataacggcacggtcgagatcctgcagagaacctgataagatttcggaagcagaagcggttccactatttaccaataccgcaatcggaatatccaagtccaacggctcgcgcaatgtcttataagtgttactagcttgtttgattttccctttggtcgttacaatcacctttccacgcggcaagaaataattcgcaatttctactgcttcatccagcaatccaccgccattactacggaggtctatcaccaacgaagtagctccctgtttcttcaaatccagaaatgctttcttaaactctttggaagggttgccggaaaaagtgctaaggctaatgtaacctacattattatccaatacggcagtataaggaatcgccggattctgaatagactcacgtacaatcgtgaactccatcggcgtacgtccacctttctcattcgggcgctcaatctttagcttaaaactggtacctgcctgtccgcgtaacatctggctgacttccgcattattcttaccggcaagatcctgtccgtcaatctccatcagtatatctcccgctttcagaccggcttttgcagcaggcgttccctcaaaaggttcagaaatcatcgaacgttttagtttcgtattataagcaatgtaagaacccatcccaccaaatgatcctttaatcatctgctccagttcactctgatcttcttccgggaaatattccgtataaggatccagcgtataaagcatattatcgattccttcccgaatcgttttactcggatcaatggtatctacatagaacatatccagttctttcacaatcgcattaaatatatccagattctttgcaatctggaaattacggtcgtctccactcttgaaactaaagaaagcaactgttgctatcaccgctactgcaacaatagctatctgcctgttcagcaattttttcatacctctttcaatctaaatgagtcgtaaaagtagctcaatcctttgttattccgccagaatcctgttaatatttaacttaatttcatcccagcgttcctgtggtatcgttgttccgattacctgaataacatttcccgagagaatagaacctatttttgcacatttatccaacgaatatccgcaagtcaatccgtataagaatccggaagcaaaataatcaccggcaccggtagtatccaccactttttgaaccgaaatggccgaaacctttatttcttctgtccctttgcggatataagaaccgtttgccccgacttttacgatagcaatactgcatttcttggcaatcactctcaaagcttcctccggctccttgccggtaaaggctttcgcttcctcttcgtttgcaaagacaatgtcgacatatttgtttattaacaaggtgaagaattccagatcattagccacaatgttataactagccatatcgagacaaatctgcaaaccggcttctttagccagttcaatggcgtgaagaatcatttcgtggtcctgaacaagatagccttctataaataggtacgcgtaacctttaaacatatccaaggtcagttcctctgctctcaaagaagccgctgctcccagataggttccgaaagtgcgctctccatccggtgaaataaaagtggatgccacaccggaaggcagtcgatccgaggtcaataatttgtcttcaatcttatttttctgcagattttcacgaaaaaattctccataattatcatttcccacttttccgataaaccctgttccagcacccaaacaagccagtccgaggatggcatttcctgccgatccgcctgttgccaagtgggttttcatctgtgaaaattttgtgttaatctgctgtaacttagcgtcatcgatgagctgcatgcttcctttgggtaaacccatttcatccaaaagagtatcatccttcagggttgcgagtacgtctaccagggcgttgcccaatcctattattttgtccattcctaatattttttttgcaaagatattgcatatttcaaaaaaacctagtacttttgcatcgcaattgagaaaaacattcttccttagctcagtcggttagagcatctgactgttaatcagagggtccttggttcaagtccaagaggaagagcaaagttgaaaatcttgattgcaaacattcttccttagctcagtcggttagagcatctgactgttaatcagagggtccttggttcaagtccaagaggaagagcaaaaagaagccacctagaagggtggcttttctatatattcacctttcttatcatccaaaggactcaataatatatcttgtgggatttggctcagaacaaccatatctctaaaagtaggtacatcatatcggtacaaaaaggaattaaatagtgattaactggtgtggtattgaatcacaacagaattgaataaattctcttattggatatttattttccatttttccatgtcccccttcatcttttctctgtctctccgatgaataaggagtttgcgggtgaagggtaacaacttcaccatctcttctcctgtagcgattagtttcaaaaattgtttcaaggcttgaaacaatccgtttcacaccgagaaacacttcgtttcaagtagcgaaacactttgtttctcggcgtgaaacatctagtttcaaatagggttgaaactaattacgaaatagctttactaatcttgctcaatggtggaatctaaaagtagcaatttgacttgattcatgatgaagagaaggtgaaggggcggctattcacctgcaaactccttgtttatcggcaatacagaagaaaagtgaaggagctggaagaattgaacatgttatagaaaagagcatcgaattgttcaaaacccatatggaatgagtcgaatcgtctattcataggaaatgattttaattgggcatttctatttatccgtttgcctatccagattcgttccacttgctatttttatttcgttccattatagtggaacgaagtaaaagtagctaattgagataatctgactaggcaataaagataatttgtttgggcaattaaaaaagtcttattggcacacctaacggagatacggtggcgaggcatgcattcgtttagctcaaaactgtgcaggaacgaacttttttggtataggctgccctgaagcacattacccaaacttttaaactgttccccgatttttcagactaatctaaaatttatccccgctgatttgctactactccaaagacagcggttcagtttgaaaacggcggcttagtctgaatattggggatttggggatcagtttgagaacaaagacgaaagaataagaggaacctcccggataaatccattagtccccctctgatactggtcgtacctcatcgtttcttgataaaggcaagtagttacacataaatgtaaagttttcgaccttttagccgtcagacaccactccgtcccatttgacttgcctttaaagtttaaataacattagatcttggcgaaaaatagcaaaccacaaccaattggctgctatggattcgccgtgacacttcatttgtttaatgaaaaaatagacgaggcagtcctaccgtttggatataaaccacctcgtcttggggtcttagccgaacctgtttatttctctatcttcattcatttcaaatcggtttatatacatgaaagaaggaaagaataccataagagatgtccagccggagatttcttgattgtatggcaatgcagccaagaggggtattctcaagcaaatcacacgattgctttgaggagaaagcgggcatattttttttgttctttccatttataacaaatgatggtttgcgccctattacaaaccctatatatacaaaaaaagcggtagggcatttgcctatccgcaagcgagggagtcgaagccctatgtgcacaaacaggaaacaccccccgcatatcgcaaggagcattttactgtttcatgtgcacatttgaattttcgacttttcgcttgcacagaaatcagctaaacgctttttttcttcaaaaacataaaaacatgtcgatctacgacagtgcaaatataagaaattattaattcattcggttctcaatctcgttttttttataaaaagtcatctttgagaagccctttatacattcttgaaacaaatttaagccgttgccaacgtcaatatactaatccgtattccttccacattcactaggcaggaagcacatgccagagtagtagaaccagtggtcaacacatcgtcaactatcaatatgtgttttccggcaagtgtttcgggatgctgaagctcgaagataccttccacattatcccgacgttcaaacacagatttacgcgtttgcgtttccgtatttttcttacgtaatatggattctgtatcaatgggaattcctgttacagcagaaacgccacgggcaatccactcactttgattataaccgcgaatttgctgttttttcttatgaagcggtatggggattatcacatcaattccctgaaaaaaatgggaagacaaaagttcggcagccatataccgccccataattgcacctatttccttttgtccaccatatttcaaccgatgaagaatcaaccggaagtcgcttcctttctcataaaagaaaaaagaagtagcccgttccaaagggatttgtccccagaagagccgctctaccggattatcttttcgaagatgataattagtacggggtagattgatattacattctgtacagatacattcttcaccctttgctaacggccggccacaaacaacgcagcaacggggaaatagcaaagataagaaagaactaagccagtctttgataagaagtgtgtgtttcataataatagagatttaaagttgcaatagcacctacatattgcaattacatattcaatggagggacttctgccagaagtttctgaaagaaaggatgaagatttccattcgttgcaagaatatgatgtccttctatgaaatgatcttcaccataaaagttagtcacctttcctcccgcctcctgaacaatcagtgccgctgcagaataatcccattttccgagaaatgcttccatccatgcatcaaaacgcccaatagctacataacagattgcggcagcagccgagccattcatgcgaatgcctcccactactccataaagctgatcgatgagatgaagagcggtctgtttatattgcagatgattataaggcaattctgtaatgacgaatgcatctttgatgttttcaacgttcgacacatgaatttcttcgccattcataaacgcttttccgcctttccaagcataaaaacattcatcccggcaaacctcataaacgacgcctaaaagaagttcggtacagctacgtaaagcgatggacacacaataaggagcctcatcatgaatataattcgtagttccatccaacggatcaatcacccagcagtatggttcatcctgataaatagcagagccttcttctgttatgaatcccgcttcaggcagtaaagcagttagggctttcaccacacgcacttcagattctttatctacataagacacataatcgtgtgcatgtttttccaccacacgctcacgacgaaagttctttcgttcttctttcaaaaaatgtccaacttccgtagcaatccggcatacatcagctgtaagttgttttaaatccaacatttattattcaaattaaaaagtgcttcgaagttatagcttttccggcaaaaagcataaaggaaaataatattttcgtgtttgatacgcaaattaatgagataacatcaaaactattataaccaatattttaaaaaaacatctaaaaacaaggccgactcattttcttttatgagccgacctttctttacttttacatcaaaatataaatgtattgttctttattccttaatttataacaacattacttctgaaccacaattttcaacttacaggtacgtccatagagtaatgccacaccatcataagtgagtccggttatgccagctcccgagtaggctggtccctggcttcctaccactcctgtaggagtagctattttacatcctccggcaactaacgcatccgtatcatttgcggcttcaatgacatgaatgacaccgtatttgcctgctgcagtaacaaaagcaatataagaattgtcttttatctgcagactacaaggatcattcgggtatccatcagacgcattgactctttgcattaacatatcggcacctcctttagttatactttccaacatattcaacgcctcaaaagtatgaacgtccgaagccgcattcgccatcatcacatcaataccaagatcagtaaccttatcatcagggataagggtaaacagcgttttgttggtagcaacacctgccggtttgatccagtcattcacatcataagctctccctatcggccctccattaattcttgacgcactgacataagagaaacctctgtttttaacggcaacaaagctcggatttctccatatattgatgaaagcaaagtctacgctatttgcctttgagccatatcctttaatttccttcaagcttaatacatgtttctgcacaccccgtatcattattccctctatggagaaaatataaggttgatccggttctgttgaatgttcccattcgggtgccatttcgatatcgctgaaaacaagcgcaacattattgtcaacaccctcaagaccttcgatattgataatcttttcctctttcaacccctctatatcttctaccacaatcttgattccattggtctctttattgtctacgacagtttttaggataaattccatttccaacggattgcctgataccggaatagtcgtatattccttcaggtcacccagtactttattacacaacgtatgttttatagacttaatgcccacagctgaacgaatcactacagacagagaaacctcttcatcgggtactaaaacagggaaatctgatggttcggtgaatatctgggatggaagtttggttatctttttaataggtattaccttttgtgccgtttttgtcaaaacgtccgttgatgttaccagtatcccggctgcttcacgcgtgttgaccttgacattcaagtcaaattcaagtgtcatatcagtttgcaaggtatctatctttaaacgttgacgttcagtcgcgtttatctcttcatattctccattctcatccatcttcaacaaggtagcatatatgctatgtatacccacagctgaaaaacttctggcagatacagtcaccgtcgagttatactccaccacatctatctcggaaggagaagtgagttctacagtaggtggcggatacgcgttgtcgtccgaataatcggactcactatcactacaatttgtcaacaacaaaccccatggaagggcaagtatcaggatcattatatttttgatatattgcttcatgaccgttcattttttattttaaagattcgatttgtaattgaaaacaatgtaaatctccgcttacacttgtttcggttacccccctaaaagcccatttatgtgaagtcaggacaaatatacaatactcggagtctctatttctattttccacttctacgaaagaataggtatcagaagttaagttagaagtaattgccgactcaagattaggcaataacgcacgtttaacagtgcctaccagaaccgtctgttcgtttacctttttcttaaatacgtcaacagccagagctatcaggtcttcactgtttaatgacacagaacagaagagcatatctattccgttcactgcttctgtttttgtttcaagatatctgcaatcgttttttactacatattgtgtcatctcggaaatagtagaaggaaaaagcacagtactgccgattatctttttttctccgtcactatagctgacaggtacaaacaccggcactttcttgctttctctagcagtctccgtacccgtatttatgattgctgtttgcccatagacagcgttcgtcctgtccagcaatgccactgaatgaacagtgtttctgatagatgacgccacctctttataactacaagaactaaatagattttgctctgacaagtgtgcataaaccaatacgttagttgttctgaaccggttccattccggaatatcttctcccttgttatcctcatcactacacgaaacaaacagacaagagatgacacatataaatagcagatatagatagtttgatttcatatttcattcattttacaaattcaacttcagcaaacaaagccctgtggtcagaaacttccggattagataaaactttaaacgacttcactttccacttattctgtggaagtccgaatatataatcaatcttgattgtcggctgatctgccggataggtgaatgtatcatcacagattctctgccagttcttcattacctcacaaatcacattagagtcggttcgggcattaaaatctccccccagcagtgtcggagtatctcccgtaccaatccgctcattaatctgttcggccattgcactccttatcaggtccgtcgaatgatccaggtgagtcgttcctatcctgattacgtctgaagttcccggctcctgaatatctacatataatagcgtccggggttctttggctccgtctataccttcaaaagttttgttattgatataaacaaaaggatattttgaaaggatagctactccatattctccaccaccagtatccatcgctttcccgaatacggaaaacaatcccaactccgcagccaattgagtggtgaaatcctgatttttattcctttttgtgttgtaatctatctcttgcaacattacaacatccggattgtatttcctgataaatacagcatactccttcaccgagtaaccggtcatttccccggacatccggcaattatagctcattattttaagagcctgcgcatacgtactttgatacgcaaaaaagaaaaggcatacccatacaatgggctttaaaagtgctttcataaatttgtttttgttattagattaagtttacttattcaacagtatatgtatattctgatatttttttaaagctaaccggtgttatggattgcatcacctccaacacatagttcaggtcgttccctttacaaacgaagtcgtacgtaaacgaagcaatcttttcgtttttaactgtaatctctatatcaaaatgacgcgagagtgttgtaagcacctctttcaatgatgcatttctgaaaataagccggttgcttttccaactcgaagcatcatcgtgatatctatcagtttttatttttattacattactccttttttcataaactgcagtttgtccgggaagcatttgctgcataggcctgcggctttgcacatgcccgatatttatacttccttcgtcgagtgtagttttgattaccttatccgaagcgtatgcttttacattgaaacacgttcccgtcacttgtattttcacattctcggcaagtacctgaaaaggggatttcttgttttctgctatctcaaaataagcctctccttccagcgtaacattcctgttgtattttgcaaactgttccggataggtcaatttagaatcggcatttaaccacacccggctaccatcaggaagtaatacgagtagcttctccccccttacagcacagacctcccgataaacaaggtttgcctcattatgactttgatagaaattatatcccacacctatcactagcaaaacaattgcacaggccaccgtccacttaaagaacaatggcatcctgattctcctgttctttcgtttttcttcccgcatcacggcttcctgaatattcttataaatgcgatattcatcaaaaggaggcaattctctgtcgcccaattcgagctgtttgccttctattatcctctgaatgtcgtcatccatatatttcccgatgccgtcaactacttcaaagtcctgatttgtatgtttcttttttgatttcatatttcaatatctattagtaatacacactgttacaaaaaagtattatacagactacgttaaaccgtgttaattcaaaagaacgttccatatcagcaaaaagtgataaaactacatcatacaataaagcaacaataggctaagctctcccactgtcgcgcgaatctgcttcaaagattggctatattgaaatttaattgtattgatcgaaagattaagtttatcggctatttcctgattggagtattttcccgaaactttcatttcaaaaaccttgcggcgttgtggcgaaagttgctcaagagcttgctgtatgatgttcatttgttcttgtttaaggttttcgttttgagaattgtcttccaattccaaaaccattgaaaggcaatcctcaagtaaatagatatttttctttgaatctctcaacgtattgagcagatcgttcttcaacatcgtaaaaaggtatctgtttatgggttttgtttcatcgatctcttcttttttcagccagagttttaagaataagttctgcacagcatcttcagccaattctttattcagcagatatttaaatgccaaagaaaaggtctgcgccgcatacgtcttgtatacaatactaaatgccagctggttcccctctttcagagccttaaccaaagcttgggcttcatcctgtgagtatttctgggacatcttaatcattttaaatatgaaaataaaaagcttattatatcaagtccttattttcaaatatattaattctttctgatatagcatgattcgcgaacaacaaatgaaacaggcctcttatttatttcaccagtctttgatatttgctgaataaaaaagtggagaatgataataatccgtcagttgctgaatgaatatcttttcgaacatcattccgatcagttgcatttatccaaccttcttctatttcttttaattcatcttcaagttgtttctgatccacctctacacctttctcgaccgctttgatgaatgtattgatatacacctcccagcgttttgcataataatctcttatcagtcctgcccacgaacggctggcataatcgttcaggcttccaccccaagtcgtaatcaagttgcgagcattcttttcataatagtctttcaactggggagaatcccccatcttccgtgcatcatcaatccatttatccagcgaacagtaaggatgaaaggcattcagcttatccaaatcattcaatatctccttcattttctcgccgcaagctttcaaagcctgataatctttagcttcaaccatcctgtcaaactccattttcacatcaagaaagtagtttccaagcacctgtctgcctacagtaatcaaatccagacgaaaagcatctctccggtcagaaggtgcttcgttcagttttctccaaacctctagtagttcaacattgctgtacacattacttgtgcgtttttcactgttcttattcaatacagggcgatacccgggtaaagtacccaatgtgcgcggcacttgtgcataaatgtcattgaataatcgtttccaagcatcgcgcacaggctgcgacacgcatcccacatgcctgtcagccagacattcaatccatttattatcatctacattcagattccatgctttctcaagaatgtattcgtagggaaattgcatcacatccaatccttccagcgtagagccgattcctttaaggttgcctccaccgttaatgagagcattctcaagtcgtgcgccactttctttgacgttacctgtcaaagtcgtgtttcctccgaaattgcccagataacaccaaatatagggctgatcatgaaaatgctctgttcttttccataattcaacattttcacaatgataatcaagtaatatcattttattctgtggcactcctgtcagcaaagccttcattcgctcggaagtccatttatctttatcaaaataaaacatccacgtcatttgcatccattgggctttgggatcggcagccgtcaatgcagcgtacatatccgatgctatcttccgcaaatattcgggttcgaaactgggcgggtcaacctcgttgaaaggatctaaaccataaatatgatcggttccgaaaagttttttttgttcatcaagaaatagcttctgaattttcgcaaacaaagcatcgttagggttcaaaaagttacaacgatatgcatcagcaaagccggcccatttgcccaaatattgaatatcggcctcgggataaatccgttttaaatcggcaggtacatgtccggcgaaggctggtaatacgggcttcatattcaattcacgctcacgtgcgagtatttttttctgcaagcttacctggtgttccagccattccatcggcaacggaccgttccaacgatctatgttagccatccgatgccagggcagatacggcggtcccgtgaagtaagagcgtatttcgatgtccgacattcccattttcgaccagactttataccacacggcttcttgtccggtaattgccaaaggcatatttataccattaagggccatccagtcaataaagcgctcccattctttccattgccaccaaggcatcgtataaccatacgtgcagtaattcaggaaaaaacgagtatccactcgcgcttccgaaaccaccttctcaccaaccatcggcaattcttcaggaatttcaacggctatatccgcataccatgacactgtagtgagacagtaatattttagataatggttcagtcccatcgccattgaattggcattgtttccgccaattacaattttatcttttacagactctatcgtaaagcagtctttctctcctttcaacttttgaaactgaaaactctcgatgtatgacggaagcaaacgtttcaataatgcttccgcaacagctacgtctttgtctttagcctgaagaaccaacgacataaacaacataaccagacacgtgtatacactttttcttttcattctgatttataattttatatagatttttctttttaacaaaacatatcccaacagcccattgaacaacaggaaaaatacaccgtacataaatgaaccgaagtaatttccgaataacgggttaagcaaattactgaatacagccgtatggatatgccaatgcacaagcaatcctccggctatgcagctaaacacatagattacaagcggattcgctccaaatgcttcgaaaaacgaaaaccactttttattctgcttcacatcaatgatatagagcagcaatgccaatgacaatgccgcaatcccacaagtgagcaaaacgaacgaaggagaccacaaacgtttattcaaaggacaggcatagcttaacaaatagccggcaaacaacagcgtggtacctataagaaatagattcagcatccggcggtcattgtctttaatatcgatgattatctttccacaaacaaaaccgatcattacttgagacacagcgggaatcgtactaagtatcccctcgggatcgacaaactggcggccctgaagatacatgtggttagaccctaaaatagccgaatcaacaatcccgacgatattatccgcactcttttcaaatccgtttccaaataactgaaaaataaagtagacaatcagcaagataatagctaatggcataaaacgcttatgcggtattgtcacggccaataaggctgtaataccataacaaatcccaagccgttgcataactcccatcaaccggagctgactcaaatcaaaatagttaccactatctattgctgttatgaaccactccataaccagaccaataaatattaataagagacttctttttatgattttcgcaatggccggtcgacactggaagttatacttacacaaggagatgtaggtcgaaatacccatcaggaacataaacatcggaaataccagatcggctggcgaaaagccatcccacttggcatgtgcaaaagcggcaaagttatacccgcactttcctgtattgttgaccaagatcatcccggcaacagtaataccccgaagtacatcaagcgaaagtaaccgtttgttcggattcataatatttgattcttttaattacttattatatataaaatagtcgttccggcagctaacactatccctataagcgattcataaggtatcagcttcagacgttctttaaagttgagttcgcatacgcctcctgtcgcatgaaagaacgaaccatgtggcaaatggtcaagaactgtagctccggaattaatcatagctgccccccaaactgcagaaatgcctatagccaatatcgtttcagcgaacgaagaagaagccagtgtcgctccggctgttgtcgatgcggtagccgccgacatcaacgcgcctgatataggagcaatcaatgcatcactaatatgagcatgatctaatcctgtaagaatccaatctttcaaagaagagttctttatgatgccggcaatagttccggttcctatcagcagaatagctaccacagacatcttttgcagtccatacgctatactcggaagaatgtttttccattgtttcatacagatagcaccacataagccacctaccggcaaagctatcaaaggatcgatattgattcctgccgcaggacgtaatgccaataaaacaatcgtaacaacaggagcaatcagactggttcttaacgaaggcagatttctctcttcctctttatcctctgtttgcatcattgtttttttgtttttcactgtttgaggcatcagacggacaataacaaaaacagtgaaaaacaaaccgatcactgccggtaaaatattggcaaacattacagccgatagatctgcattaaaatttccggctgctataatggtgttcgggttaggtgatatgatatttccacatttacctcccccgatcatagcaataagcaatacagatggagacaggtttagacgcttgcctatcgaaagagccaccggcgcaacggttatcacagccacatcaataaagacgcctaccgtacaaagcaacatcgttgcgagtgccaatgccataaatacccgtttctcacccattttgtttataatcgcattggagatgaccgtggtagccccggtttgtattaatatgcctgacaagactccggctgtcagaatccgcaataccgccggggtgacctctttcaccccttcggtcattaccgttacggtctcatttaaagatagtcctcccaacaaccctccaactatcgctccgataatcagactgtatgtcggagaaagctttcttatgattaacagtatggataatgaaagcccgattaatgcgcctatcgctgtcattgagtattatttagtaaattgttttatgattctcaccacctgtcgcaccgttctctctatgttttctttcgtaaactccggtcgcatcgcctcttcaagtgttaccggaaaaggttgaataggcagtacggcagtaaaccccatcctattaagcgcttcggtggcttcgaccgctccccccagcgctatcaccggaacctgacatttctcaccggcacgtaaaattccgtccagcgcctttcccataccagtctggcgatccagtttaccctctccggtcagtatcagatctgcctgtcggacgacctcttcgaaacgaagcgttttcaatataacttctattccggattgcaattctgcattcaaaaacggaagcaggccgcctcccattcctccggctgctccggcaccgggaagctgcgatatatccatatttgtatattcctttatcacctgtgcataatgccgcaacccattgtccaactctatcacttgcaaactatttgcccctttttggggagcgtatacataggctgcaccctcttttccaaaaaatggattactaacatcacaggcgatcgtaaagtgactctccttcaatgccggattcaattgggaaatatctatttgatggacttttatcagattttcgccgacaggctccaactcaccgtttccgctatctaaaaaacgtgcacctaaagcctttagcataccaattcccgcatcattcgtagcacttccgccgataccgataatgaattcccgacacccgcgttttaatgcgtcagcaaccatttctccaactccataagtcgtagtcttcatggggtttctccgacttgaatcgattaatggcagaccgcaggccgaggccatttcgataatagccatcgcaccattgtttacgatgccatacgatacttcaattggcttcatgaatggatcatgcacccgacatgacaccgtttgagcatgaagggcagagcatagagcttctgtagtcccttcgccgccatcagctatggggaaacgtataatctgacagtcgggtaattcctcctgaatcgctttttcggcagctttcgctatctcgaaagaaccgaccgaacctttaaacgagtcgaatgccaatacaatctttttcataaaagctatcacttatttgttttctctattaaactcaatgcagcctcgaccggatcatcaaacggagtcgtactgttactccagggagatgtaatccattgctcctcccattctcggattttattccggtcttttgtgaaatagagctgtatacgagggatatagtagtctttaatcagcccgctccagaaacgggcagcataatcttcctgaataccaccccaacttgtaatcaagcgtttggcatttgcctcataagcatctttttcctgaagagttgttccgctattgcgcgcaagttccacccattcttctaatcgatataaaggatgagaggccaacagcctgtcaacgtccatcaacaaatcaacagtttgttgcagattacgttgcgctgcgagaacacgattctccgaatcatcttttagggcctgcttataaaaattttcagctttagccgctacataatacgaaacaaactctatgaggtcgtttctgtataattcagagcttttcagttcgtcagcgcaactagcatacaaacgtatagcctgcaagtaatcatcactaaggtcgattttactgatccgccgttgatcggatattacggtttgccaggtaaaacgggggtatgaatataaagaactatatgctgttttccgaaaaagtttccaagcttcctccatggcatcgggatatcctccataacgggcctcgcagtatatcttcatccaatcgtccaggtcgatactatctgatgaccatcccatatcggctaacagttcgtaaacaacctcattgttttcgagtccttcaggggcagaaccgaacccaatcaagttacctttatttgcggcacgtaatgctttgaccgaggaactagcatacatgtccaagtctcctgtcatggtgtttttcccaccaaagttgggtacatagctgaatatccatttctttccgtaaaacccatcatgtactttccatgtttgctcggtgttccacacccatttcggataatcattgcccaaatcaatgataatcattttatcatcaggtacattgcttaacaaggctttaagcgattctttatcccagaatgaatgttgatatccgaatgtccatccctgtgtaacccaaacggcatccgggtttccggctgcaattgatttatagatcgtttctccatactcggccaataacttatatttcgcttctttatcttccttatcgataggcagctccatctcattaaaactatccgagagataatacgtattttctccaaactctttttcccactcttcgacaaacagtttgcctatctcttcgaaaaaaggtgaatccggtggcaatacataggcgttgtactcttcatcaaaaccaccccaccgcatgtgccggaattgtgtgtcgggatgtttctggacgaatccttccggcacgaaacctgcaaacgcgggtgctatgggctgcatacccaactcgcgcatacgggtcaggatttgatgctgcaaagcgatttggttctgttgccatgcatcagataagggaccgtcccacttgttcagattgcccatgcgatgccagggaaggtgtgcgggggcagtgaaaaactcacggatttcttctttgttcaatcccatacgcagccatacccgttccgcaatggcttcgctggccacagtagccaaaggcatatttacaccataaagagccatcctgtcaatttccttttcccaacgctcccagtcccagtaaggagtagtgtagccgaatgtacaaacattaaggaaataacgcaactcataaggggacacctgttcatacaattcataatcgggccacggcatcaccgacgttatatgttcaccgctccatgttttcatactcttgcaggcctctttcatgtacgtatgaaaagcgtaacagatagcaacggagctgcttccccttagggtaagccggccgtcgcttgctatcacttcgaatatatctttaccgtcggatggttcgatatattcaaagtggatagactgtgctctttccccaatctgacgttctattaactgtttggcgggggtgataatatccgtcttaggcttgtggcatgagcagaaaaaaagcgttgttgaaatcaataaatacttgattattgtatgtatcatagaaaatcataaatgttataagtgagtatcaatattttttcttcgatgcttctttcacatattccagttccgtaataatcggtaaatggtctgacaaaagcgactgaacagtttgtgtactaatcacacgccatcctttttgcgggtaagcaaacaagtaatcgatcttaatcacaggtttccatgccggcattccaaaatcatcgttgcttgcagcaaaccagctatccataccacgtattgcctccgagtaatgacgcgcgttgaaatcacctcccaaaattacaggatatttataatttttgaaatgcccggtaataaattttatttgctccgcccgtgtttcttgagagttgacgtccagatgcgtagaggtaaaaacaatggtatcattacccatttcgaataatccctccagcatggcccgcctctcatgctctttgaccggatggggcagcattatcttttggacagaaatatatggatatttacttaacatcccaataccgtaataaccggtagaatagtcaatcgtttttccgtaaagcccaaacatccctgtatgataggcaagttcggatataaaatccttccccttctgatgcggggtacgcttacggtctgttttgctatccacttcctgaagcgccacaaaatcaggtttgaaggatttgatgtgatgagcaagttcctctaaagatgccagttcgccaaatcttaaattataggtcattacccgcacccgtagagtatcttgcgcataggcaacgcccaaagtcaggcataaaaacaataataaatatttcttcattgaatacatggtttctatttttttatgattacttttcccagcccggattttgtcctaacagaggattcttctgacgctcgggattaggcacgggccacaaataatgtttcgttgcgtcgaagtagcgtgctccgccttccgcggtagacttttcgtagataacatcaccaaactcatctactccggtatcgggatacgggttggcgcccaaatcattcatacaaactttcaggctgggaccggtgatggcacgtccaaagcgaagttcgccttcacgccagcgcatcacatcggcgtatcttgttccttcacctgccaactcaatgcgacgttctcttctcaattcggtttcgagatccatcccccatgcgccaagttcgtcaaggttcatacgatgcatattcacacgatctctaagcctgttgatggagtaatcaatctgtgtttgtgtcagtttcttgccttgtagttcgaaagtggcttcggcataaatcagcaagatttcggcaaagcggatgacattgagattcccatgcccacccacactcgaaccggccaaatcaatatcgttatactttttcagatagaaacctgtacggctatttgcccccacacgattattatcttgcaatgaagcaaaacgaggcagattaaatatctcgttggccttatccgtatcaggatcaccgtcatctcctcccggccatttgtcacccggagcatataaagtcatcttcattctaggatctctgttctggaaataatccacataatgctcttcaggcgacttgtataacgatgaggtctgcacaccggtctttttataatattccaatccggtttttgccggtttaccgtctgtacacagataagcatccactaatgacttcgttggattgaggcgtatatagtctgtcggactgcaagtttcattgggcagactttgtgtacggatttcaggtacaaaaaggctatatacgatggcttcgatatttttcggatcattctcgacatctccttcgtgatgaaatagcttttcatattcatacaggccatagggactgttttcgatgatatactcactcgtttttgcagccagttcccacctttcgttttgcaaggcaatacgtgccaatatggctaaagcgccccaacggtcgagtcttcccagtttatcgcccgtatacctttcttcaggcatacgctccgccgcccatttcaaatcctcgacgagctggtcgatgactttctctctgggagtacgttcgatatatgcatcttcgggctggatgacttctcctacccaaggtacatcaccccaaaatgtcgtgaggtaaaagtacataagcgcccggatggtttttacttctgcggcataaacgtccttcttattttgagctacctgcgctttattatagttgtccagaaaattattgcagcgataaatatagctatacgctcctgtccaataggtagtgaaggggaagccgtcagtataagagtgcttgcctcccgaaaccttacttagtccactagtaatattcccccacatgacagtttcggccgtcgattcactccaattcacgagatagtctttttgtaaagcttcgtaacagggaggcaaggcatttttaagctgatcttcattcacccagaatgttacattgtccggctcgttagggttcgttctatccagaaaatcactacatgaggtaactataccaaagaaagcaatgattaaaaagtattttgagtatttcatctttatagtcgtttaataggttagaatgttattgataatccaaaaacataggtttttacttgcggatagacatctccgctggtggtcctcacttcagggtcataagctccgaagtaatcggttttagtaaacaagttatctgccgaagcatatactctaagactattaatgccaagaggtgccaccatccgggcaggaaaacgataacctatctgaatattcttcaggcgcaagtacgatgcatcctctttccagtaatcactgaagagcctgttgtgctcctgcgactgataaagtctgggataagaagcatttggattcataggcgtccatctgtcaagatgctcttttttaggaattgagtagtcattgataaacgcatgtcgagcctcatcctcaaggtaaccggcaactttgcctacgccttgcaaatagaaactgaaatcaatgcctttccattccaaaccacccttgattgcataggtgtaatggggctctttctcgccaaacaccactttgtcgtagtcatcaattaccccgtcgggagcgccgtcaggaccactgatgtcccgatacttaatatctccgggctgtacaatgccgttttgtgatgcaacaagaggaaattttggtttctggtacttacctgtagttgtattcaccgattcgaagtcatacacttgcgccagcccatcagtcagataaccatagaaagcacctatcggatcacctacccgacgatacgaaccggaagccgtactggtcagcgactccggagttccacccaaatcggtaatcttattacgggcgtccgacagattgaacccgagattgtaatttacacttccgatcttatcacgccatgacagattaagttcccatcctttgacatcaatcttaccaagattgacataacctacgttactactggaaaccccgacaatagccggaacatcgggacgaaccaatgcatcaatattttctttcttataccaatcaaagtccacattcagtctattgttcaaaaaactaaggtctaccccgaaattaagcatgcggatggtttcccacttgatgtcgggattaccgattttgttttgccaaagtcccataacaggtgtattagaagctccgataggataagactcttcggttatgataggtgacaagtaggggtagtaattaccgggaatgttttgatttcccaactcaccccaggaagcacgcagcttgcccgagctcaataccgaagtagcgaactccataaatttttcacgtgaaaagttccatcctgccgaaaacgatggaaaatatccccaacgattgcccttggcaaatcttgaagttccatcggcacgcaggttagcttcaaacaggtatttaccgtcaaaagcatagttgacacgaccaaagtaagaacgcaaagcccactcgtcttttgttccgctattcataaaattaatcattccggcactaataacgtgaatatcctcaaccatcacattatcacgtgtagcccccagtgtgcttctgttttcccactcttgcgaaaatcccatcaatgctcccaactcgtggcgtcctatggttttattaaagttcagggtgaattgcagcgtttgggtcataacgtcgagatggctttgtgagatatagtccttggcatcttcatttgctttcaacgggctaccgtccgagtaataagacaacatcttcgggttaaactcatccacttggcgggtatatatattagcagagtactgcatacctacgttcagtccgtctataattttgagatctgcattgaaaataccattgagcacacgtgttttccgttcttccattcccgactcataggctacttgcaaggggttacgcaccgaaccgtacgaccagttctcactatctaccatccggccattctcatcaggaatttgccacatgacgggaagtaacggagacatacgctgtgacaggcggaatactcctgatgtgccactataacctaagtcctttttatagaaatcaacatagctcatctgtccggtcagtttcaaacgatcatatacctccgtgtttacactgatacgcgcattatgtcttttggaactatatccgtcacctacaaccagtccatcctgatccagaaaaccatacgacataaaaaatccggttttctcgcttccaccccgtgcgctcacattatgtcccgtttgaaaagcccggcttttgtatatttcgtcaatccagtctgtattggaatattcgttggggtacaatcccgaatcatatttatcgaaagcctcttgtgtatagggcttggaaaatccagcagcactcatggcttcattggagagttccatgtattcccttccattaacaagttcgggcaatgctgtgggagtctggaatccggcatatccgttatattggaatactacgcgctctttcttttctccctttttagtcgttacaagaataacaccgttagcggcacgtgctccataaatagctgatgaggcggcatctttcagtactgatacgctttcgatgtccgaaggattcaataagttaatgtctcccccggctactccgtcaatcaagatcaaaggtgctgtactactattgatggttcccgtaccacgaatgttgatgctgggcacagcacccggctgccccgaagaggaaacaatactaactccaggcaacaatccttgcagccctgtagttacgttagttataggcctgttctcaatagcctccgctttaaccatagatacggcacctgttacattcactttcttttgcacgccataacctacaactactacatcttccaggctgacagcattctctttcatcactacgtttactgtcgttgctttcgctatgacgctttcttcacggtagccgacgtatgagtaccgaagtgtacttccatagggtaccttgatggaatactgaccattgatatcggtgattgtacctgtagtcgagccttttaccgatacggtggctccgatgatcggttccgcattctcgtcagtaactttacctttcacatatagttcctttttctctccttgcgaatcaacagggtcagttttattttgatattctttattataaaataaaatactgtcatccaggaaacggaacccaatgttagtcccttttagcaaaagagttagcgctttgtttatctctgtgtcttttacctccaatgacactttcctactcgtatccacaaattctttgctataggctacattcatcgatgccttctctgctatctgactgatagcttctttaagaggaagctctttgatactaaccgatattttttgctgttgtgcataaacaaaagcagtgacaaatatgcacattagggttacaatacaccttctgccggtggatgaaaaaggagaatctttttccataatattagtctttaaagttaatagttcaatatctattagctaatacacaagagatattaaaaagtattacggcaaataagttaatgaatattaattcgggaaatataggagaacttgccggaaatccatccatacttgataaaaaagaaagaaaccacttcgaaggtatagtttttaaaagaaaatataaagggtggatatcgtattttctcatttaatgcataaattagtgtctttacctgaaaaagaatgagcaacatccacctcacatatgagtgattccaccagaactcggctcagtctgaaaattttggggatttgattcagggcaatcacacccttaaaaatagattcattccggtacggaaatgaatgaactatgctatcgttaattatacctcgccactatgctacttttattttttcttcttgcctatattatttttttgattgcctaatgagttttcgtttgacttaagtcaaacgaaaactcattaggctatgaaatacatattaatagggaagtaattacctaaaagtaactaatgaaatcattagtggcaattgattcaaaaccgtgcaggaatgaatcaatttttagggatgtgattgccctgaatcaaatcccccccaatccccaagaattacaactgagcccaaaactcttaatacttataaattcatatagttggttcaaaaggcaatggtgtcaagtacgcctgacaatggaaatggaggcaacggagaaggtggaaatgaagacagtggtgaagcaccggatccggcagcataagaaacggtgttaatatgtaaaaatcgggcttgacattgttcaaacccgattttttctattatataaaatactactttctatcagttaacacctttatcgaatcccgttttataatattaggtttcaaaagaatctccgaatgtagttcagtttcttccaaaatcttctgcatcaacatttttacagcaataatgccaatattctccaatgattgtgcaatacgagtaataggagggttcaaatagtccagatataagttatcatcaaacgaaataatagacatatcttgaggaattctcactttatgctcatttaatgctttgacggctcccaaaagaattgtactacttaacgcaaatatagcagtaggttttgtagtagagttcagagccaacttagtctcaatataaccattctgaatcgagaactcatttcctcttatcattgcgttatcctgataaccagcttcgcgaagcgcatcaagatacccgcgcacacgttccttagttgttatagaaatatccggcccctgaatacagagaatcttactatgccccgattctaataataatttcgttgcctgataagctcctatataattatcagtagctacgtatggcaaattatgcttctcaaaatagcggtcaattagcacaatcggagttctagtactaatttcctcgagtttagaagggttttcaccggttggaaccaaaataatgccgtctattttacgcgatagaagcgaatcgatagctttattttcctgaacaggatcttccagggtatcgataagcatgacagtataattataacgttgtgcttcacggatgacaacacttgctatattggcaaaaaaaggattatctatgtgtggtacaagaaggcctatagtatatgtcgtgttattgcgcaaactttgcgcaactatatcaggctgatagttcaattctttaacggactgcaaaataacctccttagcagactggctgatcctatatttctctgatttcccatttaacactctggaaatcgtagagatagagtacccagttttctttgatacatcaatcagagttttcttcattactggctgttttttgcaaaaataacattttatttgagaaaaaagcaagaaaaatattttgttttgaaaaaaatttctatatttgcacaaacgattgcgcatcgtttacgattcaattcgccttaatacttaatactcattatatggacacaaagaagaaaatcgtagtgataggtagtagtaatacggacatggttatcaaatcagaccgtctaccaaaaccaggagaaacaattctgggaggaaacttcttaatgaatcatggcggcaaaggagctaaccaagccgtagctgctgcaagactaggaggagatgtcactttcatatgtaaaatagggaatgacatttttggaaatgaaaccttggaaatgtttcacaaagaaaagatcgacactacttatgtaggaattaccccgcaggaaccgtcaggagtagctcttatcaatgtcgacaaaaaaggggaaaactgtattgttgttgcttccggagccaacgggactttatctattgatgacatacagcatgcagaacctgccatcaaacaggcatccatcgtcatcatgcagttggaaactccaatcgagagtgtcacttatgcagccaaaatggcgaaaaaagatggaattaccgttatattaaatcccgcccctgcccctacccaacaactgcctgacgagttattagccaatgtcgacattcttattcctaatgtcacagaggctgaaatcatctcgggaatgcacattacagatgatgaatcggcaaaagaagcgattcgttatattagttcgaaaggcataaaaactgtcattattacgatgggagccaaaggagctctcgcctatgaaaacaatgagtttatccacattccagccttcaaggtagaagcagtagacacaaccgctgccggagatacattctgcggcggattgtgcgtagctctgtctgagggcaaaaatctaaaagatgcaattatatttgcaagtaaagcctcttctatttctgttaccagaatgggagcacaagtatctatacctttgagaaaagaaatacaataatcatccttaattctgttattatgataaaacaatgttcaatccacggtctattgacaagtatgttgttaatagtattttctttgatgagcaatgatgctattgcccagaaggcaataagaggtacagtcctcgatgaagcaaatgaacccattatcggtgccagtgtccttgttaaaggtacaacaaatggttctattacaggagttgatggaaccttcaatgtaaaagcgaatccttctgatgtattggttatatcttatgtaggttatgcaactgttgaacaacaagtaggaaatcagacacagcttgtaatacacctgcgcgaagactcgaaagtgcttaatgacgttgtagtaatcggctacggctctaccacaaagaaagagcttacaggatcggttaccagcatgaagaaagatgacctcaatcctggaacattcaccaatgctatgggaatgttgcaaggaaaagtggcaggattacaaattatcaacccgaacggtgctgatccgacagccaaatacgaagtattacttcgcggaacaaacacgctttccgcaggccaaggtccattaattattattgatggggtggcaggtgcagatatcagaaatatcaattttcaggaagtggaatcaattgacgtattaaaagatggttcggcagctgctatttatggaacaagaggtacgaatggagtaatcatcgtcacaactaaacgtgcaagaagtggcaaaacggaagtttcttatgatgggcaactcaccgtgggagtcgtttcacgcagagcaaaacctttatcggcaagcgaatacaaatctgttatcaaggaatatcgcccagaattggaaagttatatttttgacagtgataccgattggtttaaagaaattacacaaactccgttcagccataagcacaacttgtctatatccggaggttccgagaagttctcacaccacacttctttcaattatgaaaagagcgatggcttgcaaaagcataatagctccgaaaagctaatggcacgtaccaatattcgccagtcattattagataaatgggtcgatttggattataacctgaatatcattcatcgcaaatacagcccttcctctacaagtgcttttatgcaggcatttacccataatccaacagagcctgtttatgacgacagcgatccggatgccggaggatatagccgtatcaaagcaatggaatattacaatccggtagcgatcattaacgaaaggaacatggaaagtaagaatgataattatggtgcaaatattcgtgctactctaaacatattgcctataaaaggattaaaatgggagaactttgtttcatacgacaaggaacaatatgagacacgtgaatactacacacattattatccaagtttaataggaacaaacgggcaagcctatattgaaaactatcaggaaaacgatacacaatatgagtctactttaaattactcgaatattttcggaaaacattccattcaggcattactcggatatacataccagtatacttacagcacatctgcatccatgacaaattccggtttcgacttcgatgacaaccagactcataacatcggaacaggaacgaatctaactgaaggcaaagccagcatgtcgtccaataaagaagataatacatatatcggattcttcggacgttttatgtacaactacgatgataaatatcttttgtctgcttcactacgtcgtgatggctccagccgtttcggtgacaataataagtggggatggttcccggctgtcagcgtaggttggcgtataaataaagagaaattcctctcgaatgtcaaatggatcgatgatttaaaattgagagccggatacggagttaccggtaaccaggatttctcaaactacaaatctttgatgatgatgactacagccggtaaattctattacaatggccaatggatcaatacttatcaacctgcaagtaatgcaaatccggatctaaaatgggagaaaaaagcagagttcaacgttggtgtcgatatgacaatgtttgacaaccgcctctcgttcacttttgattattacaaacggactacatcaaacttgctatatgactacatcgtgccaacacctccttatgtatataataccttgtttacgaatgttggaaaagtaactaatgaaggagttgagctgacgatatccggtacaccttttaacactagggactttacatggaatacctcacttaccgtttcgcacaataaaaacaaattggtgaaattcaccaatgatgaattcactaacggaacatacaaagtgggatggtctacaagtgctgcctgctacactcaacgtctgatagaaggacagtcattgggtactttctatggtcctatatggttaggaactgatacagatggaaaagatgtattgctaggacaaaatgcagacggttccgtaccggaagaacaatgggaaaaaattggctgtgcttatccggatgccactcttagctggagtaataccttcagatataagaaattcgacttgagtttctcactgcgtgcatctatcggcggagaaattctgaacaactatgcgatggaatatgaaaatctaagcagcatcggacttagaaatatctcatcaaactggttatctcaaacgaatttcacaagtacgacctataaatattcctccaaatatatagaggatgcttcttatttaaaactagataatgttacctttggatatacttgggatttcacatctaaaatgataaaaagactaagattgtctcttactgcacagaatatattctgtatcaccggttattctggtgtcgacccagaagttgccctttccggactggaacccggtatggaaagtttgagctattatccgcgtacaacagaatttacttttggagttaatatagtattctaaaaaataagattaccatgaaaaagacaaatataatattaagtttcgttatctgtatattattatacggatgtaccgatcttagcgaaactgtttatacaggagtagctatgaatgacttctttaaaaatgagaaggaactggtagccaatgcaggtagggcatatacgaaattacaaggatacaattccgaacaaagtttatggacgctacttttacaagcttctgatgaatgtgctgttcccgcttgtggtggttcctggtacagtaatggacgttatgaagaaatccagacgaataaaattccacctgcaaataaattattaacaaggggctggaactggatatttaatggtattgctgcatgtaatgaaattatttacgaaacggaactatcacctatccagtttgaaggaaaagagaagattatagccgaaatgaaaatactgcgtgctttctactattaccaagccatttcttgttggggaaacgtacctttcacaactgactacacggaaaccggatacccggaacaaaaaagtcgtgaatatattttcaattatctggaaaaagaaattaatgacaatatcgagttcctagacagggagccttcagatactaattatggacgggtcacacaagctgccgcttattgtattcttgcgaaaatgtatctgaatgcagaagcatggttcggtactccaatgtatgacaaagcagagaaagcctgtaaagacattatggatataggtgcttacagcattgaagactcctattctactaactttgacattaaaaacgaagattctaaggagaacatctttgtaatcctttatgatagagtatatactagtggtagcagtagttcattctatctgcatacgctgacattggaagctgcatcacaagcaacatttaatattccggcagccccatggtcgggttttctctgccaaccagactttttccaaacatacgcagaacaagatcttcgcagaagtcagagctggttatacggtcctcaagtagacctaagcggaaaggatcttggtttcgaatatactcctgtcttctccgaagaaaaatattacaatagcaacggaggacgtggcacatacgatggtgcacgctgctggaaatggcattaccagactgatggttctttaaaagaatatacagttagtatggacaacgactttgccatcttccgttatgccgatgttgtattaatgtatgtagaagctttggtacgacaaaacagaacaagtgaggccatccaactggcagacttcaagaagattcgtacaagagcaggtcttgatgcatatactacaagccaattgacgattgatgaactttatgcagaacgaggcagagaactggcatgggaaggatggcgccatgaagatatgatacgtttcggaaaatatctgaaaaaatattgggcacaccctgaccaaagttcagaaacttttagaaatgtatttccaattcctacggatattttaaatgcaaatccaaaattatctcaaaacaaagattattaaccacaattggaaggttcacatagaaaagtgtaccttccaacaaatcaaccctgataagtatgaaaaaaccaatcatctttttacttgttttaattactaacatcttatttatctctgcacagaagatttcaaagacagagttaaaagacaaaatagccggagcttggatcgggcaaatggtaggaaacatatatggacttccttttgagaacaagtttgtagatgaacctgccccagaatccagatttccattcggttacactaaaaatatagataaattgcagaagtataacggtgcattctctgatgacgatactgatgttgagtatatctacttactattaatggagaaatatggcgtagaacctacttatgccaatatgcgtgaaggatgggtgtatcatatccgtgaccgtgtatggctagccaatagggctgcactcggattaatgcatcttggattcacccctccgttcacaggtgacgaaaatctgaatccgcactggtatcagatcgaccctcaattgattaacgagatatgggcgtatacagcaccgggaatgatttcgtatgctgcaggaaaaagtgattgggcggcccgtatcacaagcgattcgtgggcggtatctcccactgtcctatatggtgcaatgtacgctgacgcttttttctgcaaggatatccgcaaactgattacacgagccttgaaagaactgcctgctgatgacagatatgcgatagctgtaaaagagatgattgctttatatgacaaatatcctaaagattgggtaaaagcacgtcaaatcatggctaaaaaatattacatagatgagccagccatgacaaaaacaatctggaatgctaatctgaacggattatgcgggattttggctatgttgtatggcgaaggagatttccaacggacgctggatttaagttgtgcaatgggatttgactgcgataatcaggcagccaccatctccggacttctaggagtaatgtacggtgcaaagtctcttcccgaaagtttgaccaaacctatcgaaggatgggaaaaacccttcaacgaccggtatatcaatatcaccaggtttgatattcccgatgcttccattgaagacatgattgaacgtacttacaacaaagcaatcgaactggtttgctctaaaggaggaaaagtgaaaggtgatatggtatatgttaaccctaaagcacaattcattcccccgatggaattctgtatcggcccgaatccggacttggaaatcggacagcctaccgattactcatttgcctgcagaacaaatgctgatttcaaatgggaactggtaaaaggtaaacttccggcaggagttacattccaaaacggtaaactggcaggaactcctacagaagccggaaaatatccgattaccctacaattaagcgcaaataacaagaactcaatcactaaagactttgagttattagttaaaaccaagaatatagcctccaaggctgatactatttacgcaaatatccgtaaactgaacgaagaggtgctcgattcttgctggattacctttggaaaaccgatgtacgcaacaaatgtagaagtaattaatgacggagtcaaagatggcgtaggatctgtattttattcattagcggccaaaagtaatctgcctaaaatagactatttcggatacggttggaaagaagagcataacatcaatatgcttgttttagatatgggctgtctggaggaattcggaggatggtttacttctctaaacattcaatatcttggaaatgacggacattggtatgacgtaggtaaattcaaatcaactccggcacttcccgaaaccgatattgtatttttccaacctccgtttgcacaatatgttttggaatttccggcagtaaaaaccaagggaatacgcgtactaatggatgcaaaagtgcaggaacactggcataaatacacaaagaatgtatcatcattcatatctattaccgaactaggagtttacgagaaataaaggaagagaaaaatgaggaaaataattacgatatgtatcatagggctttttgctctcaacgtacaggcccagcctgtaaaaactttaaagttatctgataaagaacttttagataagattaaaggaggatgggcaggacaaaccattggtgtcgttttcggagcacctacagagtttaagttcacgggaacttatattcaagattaccagccgatcccctgggcggaaggttacgtaaaatattggtgggaaaagaaacccggattattcgatgatatttataacgattgcacgtttgttgaggcatttgacgaacttggcctggattgttcacaagaagaacttgccaaaagatttgcattcgctgattatcatttggctcatgctaaccaagcaggtagatataatatccgccaaggtatcatgccaccggcttccggtcattggttgaataacccacatgcagacgatctggatttccagatcgaagcagacttcattggtctgatggctccggcaatgctgccggaagcattggatatcgcctccagagtaggccacattatgaatagcggtgatggtttttatggtggtgctttcgtagcagctctttatagctccgctttctatgaaaagagtcctgaagcgattctaaaaaccgcaatctccgttatacctgaagagagtacattccatcaatgtattcaggatgtaatcaatttccattctttgcacccggacaactggaaagattgctggtacttcctgcaagaaaaatggaactgcgatgtaggatgtcccaaaggcgtatttctaaactttaatattgacgccaagctcaattccgctttcgtagcattagctatgctttacggtaaaggagacttcaccaactctgtcgatattgcaacacgctgcggacaagattctgactgtaatccgtctacagtcggcggtgtactcggcgtcatgtatgggtatgataaaatcccttcattctggttaaaccctttgaaagaagtagaagactttacatttgaaggaacgaatatgtcgttggcaaaagcataccaaatgagtttcgatcaagctaaacaactcatagtcaaaacaggtggaaaagtatctggtggggagatagaaattccaatcaaaaaggcggatgtacttcctttagaacaaaattttgaaaacacctatccactttacagagaacgcaaagactgcttcctgacagatacgttcgaatttgatttcaatggtaatgggtttgttatctggggcaatatttgctgcacaagaagtattactcccgattacatcaatcgtgtatctacacgccacatcggttccgaggtcttcggattggcagagcccaatgatccatacgttgctaaagtggaaatatggattgacggagagttggaccatgtagcaactttacccatgagaaatacagaccgcaaagtagaaccggcttggaaatacctcatgaaggaaggaagacaccacgttaaaatgaaatggttaaaccgcaaaaaagactacattattcgcatcaacgacataatgtattattcagagaaaaaagaacatgatagattttactttaataaataagttaagatgaaaaaaatcctgattaacatcattctactatttatcttttccatatcgggaacggcacaaatagaatatgggaaaacagttgaaataagtaaagatgtactgctcgacaaaattaaaggaggatgggccggacaaaccatagggtgcacctatggaggtcctacagaatttaaatacagaggagcgatcattcatgaaaaaattcccataatctggtatgatgactattgtaaagacatctttgctgaggatccgggattgtatgatgatgtatatatggatcttacctttctggaagtaatgcaagaagaagggataaatgcccctgctgaatcatttgccaaagcctttgcaaacgctgattacaaattatggcatgccaaccaggcagccagatataacatattgcatggtattatgccgccggcatccgggcattggaaaaataatccgcacgctgacgatattgatttccagattgaagcagacttcattggaatgatatgtccggggatggtaaataccgcatccgatttttcggacaagatagggcatatcatgaactacggcgacggatggtatggaggtgtatacatgggagcaatgtatgcattggcttatgtaaataatgacatttatacaattgtcacggaagctcttaaaacaatacccgaacaaagtaaatttcaccgttgcatcacagacgtgattaaatattggaaacaatatcccgatgactggcgtaaatgctggttggaaatagaaaaccgtcatgcttttgagattggctgcccggaaggggtattcaatgcatttaacattgacgccactatcaacgcggcttactgtgttatgggacttttatatggcaacggcgactttttcaaaacaatggatatagccactcgttgcggacaagactccgactgtaacccggcaactgccgcaggaattcttggagtcatacaaggctacaaggctatccccgaatactggaaaccggcactcgaaagatgtgaaaatattaagttcccctacacagatatctctttaagttctgtatacgacattaatctcaaactattgagtgatgtattaaaagcaaacggaggaaaaataaaaggagataaatactataccacgattcaaaagccaaaaaccgtagcatgggaagtttcttttgaaggcttatatccttctgaaagaagagttatcaaatatgatctcggtacagaaaaaacatttgagttcaatggcaagggagttgttttaatggggatgatcagacaagatgttaaagatagtaatgacaattacatcgccattctggaggcctacattgacggcaagaaagtagaaaccatagaaatgccttatgactacataaaaagaaagtatgacattttctataattatgatttagaggaaggacctcacaaactggttattaaatggattaatccgaatgaaaaatatgccgttcaatgtaaagacatggtggtttattcatccacaccggcagagccaatcaatccttataaataaaagagagaagccatgaatagaaaactactcctattattagccttattattattttcctacggattgttatcatgttcgtctgatgataacagtccgtccgaaggcgaacagaccgatacaccggaactgtttaccaaacgctataatcccgatcaaagtttttacagcaaaatattaggacaagaaatcaaatattccgtattactgcctcaagaatatctatcggaaagtacgggtaaatatggagtagttttccttctacatggctggggagggaaccaaagttcatggggaccttcaggtctgaatattcaaagcatagctgatgcgcaaaccagcaatggtagtattcgcccattgatctacatcatgccggaaggtttcaactcttatttttgcaaccgctatgacggaaagttcaactatatggatatgttcattaatgaactcgtacccctgattgataagcggttccgaacaacagccagtaagacggaaagagctgttgccggattctctatgggaggtttcggggcattaagtatagcatcgcaacatcctgaaacattctcggtttcaataggattaagtccctctctaaatacagatgaacaatacatctctttgtcacaagacggttggaatcttcaatggggaaacaacttcggaggaagcggccagacaggaacaggcaggctgacaagctattataaaagccaatgtccgctacactttttcaaggataaaccaagttccacatttcaaacagtacggtattacatagactgcggtgatgatgaagaaagactatatgcaggaaacggtgaattacattctctattacgggacaaaaatatcaagcacgaatatcgtgtacggaacggtgcccacactgacagttattggcgtgaatccatgaaagaggcactgccttttatcgaacgttcattcaaaggagaaaactatccgcaggaaactctgaaaaaattcacagaggaattacatgctactaataaaaacataaaagtaggtaattccaatatcgaactatggttaccggatgactacaattccgaactaacttacaaagttctttattacagcaaaggagaaggtaatgttaatcttacaacagagaaggtggcagtggcattagattctcttatgcaaatcaaacgtatgataatcgccggttttgatgtaaaggaggttattcaaaatgaaataagtttttcaactattaccgatgcaatagagaaaacgattcatactgaaagtaatgcagacttcagattaggattagcctatggttcagaagctgattacttatacaagcaatcatcaggtaatacccctgccatcaattttttctttgcagaagatgcgggtattaacaacctttctgacgagaacctggccaaaatttattatttggatataacagacggaggtagtaattacaatagtatgcttactctattcaatggattgcgggatgcagaggttccagtacaatatcgtgtcagaaacggactggatagtgaacagtccgcccaaacaggtatttattcaatgagttattacattggtgaacagttaataaagaaatgatatgaggaagatactgttatatataatcctatctctatcaggtatagatggagcttgggcacttcccatagaaaaagaagggatgaatatttatagtccctctttaaagcaagaagtctcctattctattatcctaccggaaggttatgaacattcagatatagaatatcctgttttgtatatgtttcatggaataggaggtgattataccagttggctcgaatatggcaatgttgcccgtgtaatggacaaaatgataaaaaaaggagaggttgaacctttcattatggttattcctgacggctatttgtcttattacagtgacacctatgatggcagttttctttatgagactttctttattaaagaactggttccatatattgataacaactaccgcacccgcaagaatgttagcgcacgttcaatcattggtttctctatgggaggattcggagcattgtccgtcagcctacgcaaccgtaacttatttggttctgttgttgcgttatcaccatctatccgtacagaaaaacaatatatagaagaagaaccacaaaaagaatgggacagtcaatggggacggattttcggaggagcaggaaagaatggcaaccagcgtctaaccagttattataagcaacattcaccctaccacattctttctaccctccgtacttccgatttaaaaggatttggaatcatgctggatattggagataaagaaggtactttatgcgaaagtaatgaagaactgcaccgattattactggaaagacagatacctcatgaatgggaagtacgtgcaggaggacatgattttacctgttggaatggagcactaccaaaagcgttcagattcataaacaaatatttcaatgagaaccagacaggaaataatgagagaagccttcttctgaatgagacaccatttatcaaaatgggcaatgcaacggtttattatccggaacaggctcaaggaagcacaagagaatatcctattatctacgtacagggagaaatcaacgagcaacaacaacagactctcgtcaatcaatttcatgaaatggtagacgataatagaacatggcctgctcttctttgcttcgttaaaaccaacgcagacctctcagcaacaatctcttatatagaaaagcaactctccgaaatcagaagttcccaacgcatgagggctttaatcactttgaaagataacatcaaagaaggcatagaagccattcaaagggaaaatttgtttaccggcatagtctgtgtaaacaccatcggtgatgaaagtgacgctctgaattttataaaagcggtcaactctcataaaagatatcccaggtgctggatagaagtactacccgagtcaaaagaatatggttttagcagtaatattcatatccttttgaaggaatcagacctggaacatgagttccggtcaagaaaatgtaaagaaaccaacgctttcagctattgggaggactggattatatatttaaataacagaattcatgtttaacaattaaatactaatagtatgttcacagtaaacagttatttattggcagttatattctgcatcgtaaccatgatttgttggggttcttggagtaatacccagaaactagtttccaaaaattggcgttatgaacttttttattgggattatgtgattggaatggtattgttcaccatcttactaggcttcacaatgggtagtcatggagataccggacgttcatttctggaagatctgggacaagcatctggagacagtatcggctgggttatcttggggggcgtaatatttaatgcttcaaacattcttctttcagcgtccatctccttagctggtatgtctgtagcttttcctttaggagtcggcattgcactggtattaggggtaatcgtcaattatttgggaattccaaccggcaatcctttgcttttattcggcggtgtagctctcattgttattgccattatttgtaatggagtggcctccggaaaaatgcaaaagggtgaagaaagcaggaaaaacaacaaaaagggaattatcattgcattaatagccggcgtactaatgtccttattctacaggttcgtagtgaaaggtatggatgtagaaaacttcaattcacccgctataggaatgatgactccttattctgcaatctttgttttctcaataggcgtattgctaagcaattttgttttcaacacattagtgatgaaatatccttttgttggagaaaaagtcagctactccgaatactttaaaggaaacacgaaaactcatatatgcggaatgcttggcggagcgatatggggacttggttctgcattcagctatatcgcatcaggcgaagctggtccggcggtatcttatgcactaggacagggcgcaccacttattgccgctatttggggagtatttatctggaaagaatttaaaggctcaacgaaatctgttaatcaattactagccttgatgtttatcttcttcctggttggtttgggaatgatagtagttgccggaaactaattattaaccttaaatagaacaacatgaaaaagtatttttacttattaaccatgctggcagtagtactaagtatgaccgcttgcagcgatgacgacaatcatcccaataccaacgttctggataaaccggaagttactgttcctgatgtaaaagagagttctgctgttattacatggaaagccataggaaacgcaacagcttatatttatagtttgaataacggtaatgaacaaagtactgaccaaaatacgattcaactgacaggtttagagccggaaaaaagttacacattcaaagtaaaagctcaaaaaaccggatcgatctactttgaagattcagagtatgcagaaatcacttttacaacgacctctgaagtaactgtttatcggatagctacttttgcagatgattgggataaatggtattacgaatataatgacaatggtacggttaaacgtgtctacagactaaatggagaagagttggatagagaatggctctttgcttacgacggaaacagcgtcacggtgacaggtaagaacgcatatactatgacattaaatagccaggggtatgtcgctacttttgtagatggttcgaatacatatgaatatacttacgacgagaatggctacatgacaaaagctgtaaaaaatggcaatatcgcatctaacatcaccatagaaaatggtaatattacgcaatggaccagattctctgatggagtagaacaattcaaggttcagacctattctgccgtgcctaatgtaggcggagcacattgtatctatgcggaaggcagtggtccaagtcgttggctggttgaaacaggtctctttggaaaagcttcggccaattgtcatacgagtagcggctggcagcattcagccgttgcatctacttacacattcgaatatgatgaaaatagttgtatcaaagaggaaagcaagaactatgacggagatattgagaaattctattatacatatttctccgaataacactttatgaaataattatttcatggaggtgtgtcagacttttagacacacctccatcatttaaggttgtcaaaactttagactgtttagactgtttagactgtcatatccagtaaaacctctctttttcttgttcttcgtttttggggttaatgttaaatgtctcaaagctaagaaaaaaataaaaagctacaaagatatggattcatacctttgcagccccgctaatgtcttgtttgtgtgctttttatatctgaatatatcaatcagataatccctctcactctatcgtcaaatgcagaaagcgcagctttcgccccttcgcccatagagataataatttgcttataaggaaccgtagaaacatctccggctgcatagatacccgtcgcattcgtacggcaatgtgcatcaatcatgatttcgcccggacggttggtttccactatgtcgcggaatacactgctattcgcagaaagcccgatctgtacaaatacaccatccaattccaccaaacgttcttcttccgttttgcggtctttgatgcgtagaccagtcagcttatcaccatttcctatcacttccgtagtctgtgaacttacaaacacttccacattcggcaatgatttaagtcgctcttgaagtacactgtccgctttcaactcatccataaattcaaaaacagtcactttggagcagatacctgccaagtcaatggctgcctcaatgcctgaatttccaccacctactaccgctacatgctttcctttataaaacgggccatcacaatgaggacagaaagcgacaccacgacctatatattcggcttctcccggaacattcagtttacgccagcttgcaccggttgcaataatcagtgccggagccaggaatttctcaccaacagaggtagtgatctgcttctgttttccaaccacttctactttttctactttacgatgctccagtaaatccaccggataacgcaacaagtgagttttcagattatcggcaagttcatttcctgtcgtttccggaacagaaattagattttcaatacccaccgtttcttttacctgtccgccaacacgctcggccacgatagctacacggagtcctttacgggcagaataaatagctgctgatactcctgcaggtcctccaccggctacaatcacatcatattctttcacctctgcattcgctttggtttcgtcaataccatattgttcttccaacttggcaagcaattcgccaaattcaccacggcctacatgaagtaattttccatctgcaaagacagagggcactccttgtattttcagtgcatctacttcgtcctgataaagcgcaccgtctaccatttcatgcgtaatagccggattcaaagtagtcattgcattcagagcctgcactacgtcaggacagttcgtacaagtcaacgaaacataagtggtcagatgtatcgggcctttcagtgctttcacacggttgcaaacggcctcatcgggaaagttctttcctttgccgtccagattcaggatagccaaaagcaatgacgtgaactcatgtccgttaggaataccccggaatgtgattccggtacgatcaccattccttaataaagtaaacttcaatgcttctccctcattcaccgagcaagtgatatgatcggaacaatccgctacatctcccagcagctccaataattctgttttgttttcgtggctggatgatacgaatatatcaaaagtaaaatttgcctccagcccagcaaaaataccctttagttgttcttttaatgcagattctaacataccttttttcctttcatttttttaaaagaaaggccggcagcgtctcccgttaccggcctcccataatcaccattatcaagatctatcaaatcttacctaccaggtcgatgcttggcttcaaggtagactcacccttcttccatttagccgggcaaacttctccgtcatggctggctacaaactgtgcagcttccaccttacgaagcaattcacttgcatcacggccaatattgttatcattcagttccaccactttaatctttccttccggattgacaacaaatgtaccgcgataagccataccttcttcttcgatatatacacccagtgcacggctcaaagcgccagtcgggtctgccaacatcgggtattgaatcttgcgaatactttcagaagcatcatgccaagctttgtgcacgaaatgagagtcagtacttaccgaatagatttctacacccatcgccttgaactgatcgtacttttcagccatatccaccaattcagtaggacatacgaaagtaaagtcggcaggatagaagaaaagaatcgcccatttacctttcaggtcattgttggttacagtcttgaaagctccgttgtgaaaagcctgaacgctgaattcaggaagttgagaatttaaaattggttccataatctttattgcttttattgttattaattggtttgacttataacatcagaaacaatcttttgttttttgtttctgatgcaaagataaaggcagaaaccccgccttttcaaaaaaagtccaatcgaatatttctatgctgtgatagatgaaattaataaaagcattttatacctttgcgtgcataaacaaaaaaactggaagtatatacgattatgaaacatcctctagctcaattcctatattgccccgaatgtggttctccgcatttcgaagtaaataacgaaaagtccaaaaaatgtacagattgcggcttcgtctattactttaacccttccgccgccaccgtagcactcatcttaaatgagaaaaacgaattgcttgtctgccgacgtgccaaagagccagccaaaggaactctcgacctacccggcggattcatcgatatgaatgaaacaggtgaagaaggcgtagcccgtgaagtgctggaagaaacagggttgaaggtaaaaaaagcagtttaccagtttacacttcccaatatttatgtctattcaggttttcctgtacacacactcgatatgttttttctgtgcaccgtagaagacatgagccatttttcggcaatggatgatgtagcagattctttcttcctgcctctctccgaaattaatccggaagattttggactagattctattcgccgaggacttaaaaagtttttatccggcagataattcgttaaaatataacaaattacagaaacatttcccctttcattctgtcttatattttaatgagctttaaattaatagctattaaaatacgtcattgaaagatatatagtacttttgcataaacacccgattatgaaaaaagaaattactagactcatttgtgcagccatctgctgcacgcccattataggatttgcccagacaagtgataagttcacttcgactgacaatctttataaagaaggaaaagaacttttccaggaaaagaattatgcagctgctctgccggcattgaaagcatttgtaaaacaaaagcctgcagccagccttcttcaggacgcagagtatatgctagtcagttcggcttacgaactgaaagacaaaaaccgcatcgaactcctccgcaaatatctcgaccgttatcctgatactccatacgctaaccgcatttatgcgctgttagcctcctgctatttctacgaaggaaaatatgatgaagcactggcactcttcaactctgccgaccttgatttactaggtaatgaagagcgggacgactgcacctaccaactggctacctgttatttgaaaaccgataatctaagagaagcagccatctggtttgaaactttgcgcgccaacagtcccaaatacgccaaagattgtgattactatctttcctatatccgctatacacaaaaacgctatagtgaagcattgaaaggtttccttcccttacaggacgactcgaagtacaaagcactcgtcccttattacatagccgaaatttatacgcagctcaaaaactatgataaggcacaaattgtagcacaaaactacctgtcagcctacccgaacaacgagcacgctgcagaaatgtaccgtattctgggagatgcctattaccatttcagacaatatcaccaagccgtagaagcattcaacaattacttgaataaggatcgctcggctccccgccgggatgccctttacatgctaggactctcctactaccaaacaaaagtatactccaaagcagccgaaacattaggtaaggtgacaactgacaacgatgcccttacccaaaatgcatatctccacatgggactctcttatctgcaactggcagaaaaaaacaaagcacgcatggcttttgaacaggcagccgcctccaatgctaatatgcaaatcaaggaacaggcagcttacaattacgctctttgcctgcacgagacttctttctccgctttcggtgaatcagttactgccttcgagaaattcctgaatgaatttccgacttctccatacgctgaaaaagtcagcagctacctggtagaagtttacatgaatacacgtagctacgatgcagctttgaaatcaatcgaccggattgccaaaccaagcgcgcaaatattggaagccaaacagaagatactgttccaattaggaactcaatctttcgctaacgccgacttcgaacaagctctgaaatatctgaaccaatccattgccatcggacaatacaatcgtcagaccaaggcagacgcttactattggtgcggagaatcctattaccgtctaaaccgaatggtagaagccgcacgtgattttaatgcttatctgcaactcaccacccaacccaataacgaaatgtatgcgcttgccaattataacttagggtatatcgctttccaccggaaagactatacgcaagcaagcaattacttccaaaaatacattcaactggagaaaggcgaaaatgcaaccgcacttgccgatgcatacaatcgtattggtgactgccacctgcatgtacgtaactttgaagaagccaaacagtattattcgcaagccgaacagatgaatacttcttccggagactattctttctatcagctggctcttgtatccggtctgcagaaagactataccggtaagattaccttgctgaaccgtctggtaggaaagtaccctgcttctccttatgccgtaaacgctatttacgagaaagggcgttcctatgttctcatggataacaacaaccaagccattacttctttcaaagaattgctgactaaatatcctgaaagtccggtcagcaggaaagctgccgccgaaatcggattattatattaccaaaaaggagattacaaccaagcaatcgaagcctacaaacaggttatcgaaaaatatccgggcagtgaagaagcacgccttgccatgcgtgatttgaaatctatttatgtggatctcaaccgcatcgacgaatttgctgctttagcaaatgccatgccaggacacatccgtttcgatgctaacgaacaagactcgcttacgtatgccgccgcagaaaagatttatgcacgaggcagaatggaagaagccaaaacaagcctcaacaaatacctgcaaactttcccggaaggagccttcagcctgaacgcacattattatctctgcctgatcggaaacgagcagaagaattatgatatgattcttctacattccggtaagttgttggaatatccaaacaatccgtttgcagaagaagcactaatcttgcgtgctgaagtgcaattcaaccagcaaaatatggctgaagcattggctagctacaaaatgctgaaagaaaaagcaaccaacgtagagcgccgccaacttgctgaaacgggtattctgcgttgcgccttcctattacgagatgatatagaaaccatccatgcagctaccgacctgcttgcagaagccaaacttagtccggagctaagaaatgaagctctttattaccgtgctaaagcctacaccaagcaaaaggctgacaagaaagcaatggaagactatcgtgaactggccaaagacacacgtaactcttacggtgccgaagctaaatatcaggttgcacaatccctctacgacgcaaaagaatatgccgctgcagagaaagagttgctcaactatatagaacagagtacgccacatgcttattggctagcgcgcagttttatccttctatccgacgtctatcatgctacgggtaaagatctggacgcacgccaatatctgctaagtctgcaacaaaattatcaagggaatgacgatattgaaagcatgattgaaagcagacttagtaaattgaaagttgagaattgagaataaaaaaatagaaaagtatgaaacgatctcattatataataagaggactcgcattggcaatctcaatgccatcctgccttcaagcccaaaccacccaaccgaaggatacaacaatgacccgcacggtcgttgtggaacaagaatataacccggacattatggatgcttcgaaagtgaacgtcctgcctaaagtagaagaaccgacagtgagcaagaaagaagtagaatatgctacaacattctttccggccacttccgttccggcaggcctgatgcgcccctataccggaaaagaagttcaacccggcactcccccgggatatgtacgtgccggatatggtaattatggcaatttggatattcttgccaattatctattccgtctgtcgcagaaagacaaattgaatgtacgtttccaaatggatggaatggatggtaaactaacgcttcctttcacagactccgaaaaatggaatgcattttattatcgcacacgcgcaaatgtagattacacacaccaatttaataaactggacttaaatattgccggaaacttcggattgagcaacttcaacttccaaccggaaagcgtaaacagcaagcagaaattcacatccggtgacttccatgcgggcattcatttcactgatgagactgccccactgcgtttcaacgcagaaacaaatctgttgatgtatgaacgtcaacataacatgttcaatgaatctgaagccaatacaggtatcaaggaaacaatcatacgcaccaaaggcgatgtcacgggagctatcggcgaccaacaattaataactatcgctttggaaatgaacaatcttctctacaacggatatacaaagaatgtttccaccggagatgaatacttcaaaaactacacaacgcttcttttaaatccatattacgaactggataatgatgactggaaactgcatatcggagccaatgtagatttatctttcggatttgacaagtctttccgtatctcacccgatatcactgcacagtatattttttctgatagctacattgtttatgcaaaagcaaccggcggtaagcaattgaatgatttccgcagattagaaagtatctgtccttacggtgaactgccggaggcaaataccactgccactttgggatacgtacaacgtccttatgatacttacgagcaaatcaacggtagtatcggattcaaagcaagcccttatccgggactttggttcaacgtgttcggtggttatcagaatctaaagaacgacttatcttatttaggttttgacccaagtaatattcattcaggttcttacctttcttttgctcaagataatacagaaaatctctaccttggcggtgaaatcagttacgattacaaagatatcctcggaatatcagctaaatatacttaccgtaattgggacagcaaaacagaggaatatctgttggctgtgaaaccagtcagtgaaatgtctttcaatgtacgtattcatccgatctctgctcttaacataaatctaggttatgattacatcagccggaaagaagtgaaagaatatgcaaaaatgaccgcaattaatgatttgcatatcggagccagctataatgtattcaaaggagtatccgtttatgctcaagtacataacctgctgaacaagaaatatcaatattatttaggttatcctacggaaggattcaatttcttaggaggattgagtttccggttctaaagtttatcaataaatcacagtaacagttataacacgagacactcatctcataaaaaagagggcatctcccatagggatgatgtcctctttcaaaccaaaaacttaatcttcaattattattttgttatcctcacaacaaacccaccaccaggagccatgtgtaaattcaacttcttattggctgatacgcggatcacttcacgcttatagtctttcccaacacgatcggcattgataccatctctaaatatttctgcattgaactcaccatcacccaagaaagacagatcgacttcaacatcacgctctttccagtcggtcaatccacccacataccagataccgtctttctcacgtgccattacaatatgttcgcctacttttccgcttattggaagtgtctgattccatacagtaggaatggcagcgataaacttcgtacattcttcctctttcagataattagtaggtgcatcacacagcatattaataggagaatcaaaaatagtatacaatgctaactgacggcaacgtgtaccctgactcatcggttctgtatagacagcatgaaagttcttcatgattacgttattcatcgctccctgtgtataatcaagtggtccggcaaccatgcggatgaaaggagctgtcacatcatatatcacttgatctgttcccggttctgcccacttcatttcttccagtccatggacaccctcgaaattgatcgtattcggataagtacgttgcaaaccagtcggtttgaacgttccatggagatctatcagcaatttgtattttgctccggtttcagccgctttacggttaaactcaactacttgttggtcgtcacggtccataaaatcaatcttgaaacctttgattcccattgcggcataatgcttacatacacgatccatgtctttttcaaaagcacgatagcccgcccaaagtatcaaatctacatttttgctttttgcatagctaatcaactctttcaaatcgatttcaggaatcacctcaaacaaatccgctttacccggcactgcccatccctcatccaatatcacatattcgataccgaatttcgaggcaaagtcaatatagtatttataagtctcattgttgatacctgcgcggaaatccacgttgtagagattccagtcgttccaccagtcccaagccactttacccggtttaatccaagaaaaatctgtaaattgtgccggagtagccagtttatataccatatcattacaaagcagttctgcatcatccttggcaatgaccatgacacgccagggaaatgctgtgtttccctccactctagcaatataaggttcacgagattttactacccctttcagtccgcgaacttcgtctactatcgttttcggataagctgcaaagattccatccagagaatatccatgctcaccatgtttcacatacatacccggatagttcatcaaatcggcttcagtgatacagattttttttccgttctttccctcgaccaaaaccggtaaaaaggcaatctgttccttatcccatgcagacaaggcagtttccagatacgtattttggaaagaactgtagaaaggatctttcttgccctcgttcattcggcctttcggtgaagctacaaaaactttcggatcattcggaaaacagaaagaagcctgctcgctttccaccataaacggcttcttcagttcagagacaaaacgataggctgcaccatcttcataagctctgaacaccaagctatatcctcctttaaagtcaatggttagttcattgaactggtccttgattgatttcttcttatagatgggaggatagatagtctcatttacagaacggcggctgatcttctttactttcggattgagtccgaaagctgtaccatcagttagtttcatgaaaataggagatggagccaccatcacatcgttgtcgtgaagaacggagtattccacattcttatcattcacaatcacattcacctgcactttaccggaaatgtctttcagctcgtacactttctgtgcacaaatggttaaaggtgcgatagccattagaaccggcaaaagtcttttcatcatacgtttcataaactaatactttttgtatttcacacagttttttatttacatatttatcataagagtaccgcttggcagagataaaggaggaagcttaacaggaagaatttcctgctaataaagcattgaacaagtgctaaatagcacctttcttatctcattcgcgctaccattttttagaaatcaattgtcacctgataggtatccttattctcaaagaaggtctgttgcacctcatattcgggaagccatacgtattttttttcccctttatattcggcttcgagcaagaaagtgaaccagcggttataaggcaattcgtcggtatgcaaaggaggtgcggggctatcatataagttggggacaccagttatcagatattctcctttcttatccgtctcataagtacggtaaggagtagcgatcaggtcattgaattttgcacgtgaaccatacagattcagctttacccctttttgctttttacctttcacttttacagatacctgtatgttttcggggaacatttgtttgaagaatccgtcgaaatcacgtctcggacgtttggatttggcggtgtgattgattatatgaactgcatacgagctccatttatatgttttataatgactgttcatcacacaagagtcaggttcatattcgatatggttcaccggattgttctttgcccggattctatcagcatacaagtcggttaccccacgataatgtccgaactcatgtgccactcctctatgaaaatagtcgataccaaacagatcttcatgttccgtcttgctacggctacggcaaattaccatattcagatcgtccgccccaccgccgcaataccatcctttagccgattcttcatcgtcaaaatcaagaatagaatctataatcagcagtacatcgtgattgggaaaaccggcactcttctgatagattttctccaattggcgggaggagcagtcgtaaatcacctgcagatccggtatataacggaaatagtagttgaaacgtccattgccggctttgttccagaagtcgttcacttggtcgaaaaaagcattcagcttcgcttgataagcttctttacctccccaatgctccactccggccttatcgacagccacaaatacccggtattcaatggtgtccaaagattgttgaatctgattttcctccaatgtctttgcctccatccaagagaagaaaggcaatagagcgggaaatatgagccatcttttccagttgtttttcatattagttcttagttaagaatgtattttatttcttgtaaatcacgactatttccaccgaccatcaaagtgaagtctcctttctccacaatgaacttcatttgattattgtagaatcctagttgttcatcttttacgtcgaaggtgaccgttttgctttcacctggactcagcttaatcttttcaaagcctttcaattctttgatagggcgagtgatagaagccacctcatcacgcacatacaactgaacaacttcctcgccctcgcattttccagtattggtaaccgttacagcaacacgtgtataagtaccttttccatcacccggaagcagtttcacatccgaataattgaaagtagtgtatgacaaaccgtagccgaacggataagcaggctccgtaggaatatcaatgtacttcgcacaccatccgcccaatgcagtggggcgtcctgtgctcttatattgataatacaatggtatctgtccgttatgctgcggaaaagtcattggcagcttacccgaaggattataatctccccaaagtacattacagatagcattacccgcttcactccccagccaccaggtacataagatagcgggagcctcccgacgaacttcattgaaaataacaggacgaccacacatcattagtacaactaccggtttgccagtcttcaccaattcggaaaccaaacgctgttgttcggcagcaatagaaatatctcctttcgaacgcatctcaccgctttcccaagcttgttctcccattgcaacgataaccacatccgattggcgggcagcagctaaagtctgatccagatttacaattttattcgttttcaagtcgtagccatcgttatagttgatgtccactcctcgtttctccattgcctcatacaaggttactactttaccaacctctgcacaggaccatgcaccgcacatatctttctgcgatttggaaagtgcaccaatcaaagcaactttcttgatagaagaagaaagcggtaacaccgagttttcatttttcaaaagaacaatagaacgttcggaaacgtagcatgcttccttgcgggattcctgtgaaccaatcactgtacgttccctttcttcatcacagtatctgaacggatcatcaaataatcccagtttatatttctgttccaaaatacgtctgacagcatcatccaccagcttgatagataccttaccctcttttaccagagacaccagattcttggaatagcattcacttaccatctccatatccagtccggccttgattcctttataagcagcttctttttcatctttcgcataacggtggttcatcatttctcccactgatccccagtcggataccacaaatcctttaaatccccattgattcttcaggagctccctcaacagaaaagtacttccggtagacggttcgttattaaagtcattgaacgcactcatgaaagtagcagcaccggcctctgcaccagccttgtaaggaggcatatagaaattgacaaactgtcccatcgacatatccacactattataatcttttccggcaatagctgcaccatatccggcaaagtgcttaatacaggataaaatagtattctctttcgataaatcatctccctgtaaaccatgtacacgcgccttagcaaccaacgagccataataaggatcttcaccggccccttccatcacacgcccccaccgggcatcccagctaatatccaccattggagcaaacgtccaatgcaacccggctgctgcagcttcctttgccgcacatctcgatcctctttctatagcatccagatcaaaactcgcagcctctgccaatggcaacggaaaacctgttctatatccatgaataacatccaatccgaaaagcaaaggaatctgtaaacgtgatttcatagctgcctcctgatatttacgagtattggcagcaccggatacattcagcaaagaaccgatcaatcccttacttatatcttctgtccgactgatacgtgtattatcaggacctgtggcaaatccaccggaacattggcttaactgccccactttttcttccagtgtcatctttttcatcagaccggatatgaaacgattcatttgagcctcatccttttgattctgcgccatgcttcccatagcgaaaatcgccatacacgaatatgtaattagtcttttcatcattttattataagagtttatctgtattgatttaaatgttaatatcctccatacgttttactttctatcgcaaagatagccgctggtcagattcacattggcgaattgcgtacaaaaggacaataatatcgtaaagtctgctttttttctatttctttccgtatagcattcaagcacttctgtcatttttttgcctttattgatacgattttctccttactcttcacttattcgtaagagatattatccagcacttttattccctctttccgaacacctgtctcaaacagattcttaaacgattctaccgacaatgaagtggacggtttaaaatctgaagaattcatatacgccagcaaagcggcatagaattgtaatccttccggtgtgtcacgtaccgcttccaagtcggacatacaaagcagtaatttactgccctctacattcaactccatcaataagccgagtttatgatttcgttccacattgtcaattacctgcacaatagggcggtattcttttggcataccatccagaataagcggatagctatgtttgataattggataccactgccagttcgtatggtattcggtcgggaaatcatcgaataccggatgctcgggattggtcagaatccccaatgtaccaggtgaagcaggtttcttgatgcggtcacagatacttttgaacatacgataattccaatagtcggtctggaacaatcctcccactgttacttctttacagtcttcctcaagaggcatcaacaatacctttccaccttgctttaaggcattcagcacatcatccgttagttggcgggcaactacaacattacctgccttcaattgcttctttgcaggatatatccatagcggataactattctgataggaagttccggatactttcaaaagtaattcggctttatacgcttgctccacatcgggcaatgtcaaacgaatagttccggcagtcaataatcctaatcccgatggaatagccatcttacctttgccaaggcttttcttcccatttttgagttcccatgaaatacttttttcgttcaatgaagtttctccataattggcaatctcaacagtacctgcgaatgattcaccgcctgtccaacagaatttggcagttgtcaataaaggaaccacttcactacagaattctctccatttcttcggttcaaccaatcctttactatccataaaagcatccagaataccaacataagccgacccctgtcccggataatcctgtaaatcgagtaactgaaaaccagccatccgtttggaacggagattcatttcaatatctgcccggtaaagttccacagaccatgcacccgatgctttaaaaaaatcatccgcctgctccagcatgccggctttctccaagcggtcacgaaacacttcaaaattccagggagctaagactcctgtatatttcttcatctcctcataattcgggtaagtttgaaactgtccggtttcatgtccgatcaccggaacaggagatttttccagagcctcatcaaagttcattaccgaattaggataggtattattaagatagccaccttcttccgcatctgcgaaagagaaagaagcacgagcatgagtagaataaccctcaccactgcctacacgacaagttaccagaaaatcctcacccggaatatgtcctcgtgagcctaaaaagatattcgaaccatacgtgtataggtgtctcggctctatggaccggaaacgatctacaaactctttcatcacattgatgtcacctcccagctcatttcccaaggcaaagagtacaaaagaagcatggttactatattcacgcatgatattctctccatctttcatcagaaaatccatcagctcggcagattctttcttaaaccctccccagataggtaattccggctgcaagtaaataccctccaagtccgcagcttcaaaacacgcagcaggtgggcaccaagaatgaaaacgacaatgattcaatccatattccttacaaatcctgaaataacgacgccattgttccaagtccatcgccgtatggcccgtcaaagggaatacacaggcatcatgttttcctcgaagaaatgttttggcgccattgatagtgaaatgcgtttcttcagttttaaagtcacgcaaaccgaaacgaactgttttctcgtctatgccatttatctctgctttcagttgatatagagccggctggaggtcactccacaatacagcattatctcccaactgataagtgaattcatattccttgctcccctctttcaaattatattctgcagatctggctttatgctttttggcagtattgaaagcagaagctgacaactgcagtttcttcccaccaatgcctgaagaattggaaagagttattttcacttttacggagcggtcttctacttgaggaaaagcctgaatggactcaataaacaatggattcattgcctgcaattccatccgtccgataataccgttccagtttgtctgggtagattccgtacaagcgtgagaacttgaacgaatctgcccgggaatactttttccgttatctacacgaatagtcagcttatgtgaaccgggagccaggaagtgagtgagattaaattcctgtggggtagataaatagttgcatttacccacttcccgaccatcgatccacacggttgtcggacgagtacgttccagaaacaacacgatatgcttttctttccagtcggctggtatttctatattcctgctataccatgccgcaccttcatatttataatatctggacaaataagtggtctccgacttgttggtattctctattccttttcgattcgaatctgttgtaccgggtaaagtcacagtttctgcaaaatccatgttccacagtttttcctgttctcccttgccgtgagggtccaatgcaaaactccacgttccgctcaaatcaatcattttgcgcaaacctgatgtctgcgcccatgatgtacacaaaaaaacaaataataataaaagagttccagctaatcgattacgcataactttattcataatatatgatttaatgtccttaatttatctgtttacaaagataggacggagaacaaaccacaatgacaaatcccgtacaaaaaaacaataatatcgtaaaagatactgtgtatcatctcttttatatcactatcagcatgataatgtccttgcctgactgataaaatacacaaatagttttttcatagcttcatccccttccacagcctgcaactctgggtggaactgaacaccccaaatatgttcggaatcagattcgattgattctatgactccatcatcagcgaaagcagatgccttgaatccacaagccaatttcttaacggcttgatgatgaatggaggagactttcaaactttccttgcctgtaacagaatacaattttccggtcctcaaacatcgcacattatgctgtaatatcataaacgcatccggtgaccgatgattaatttccgagggatattgagcaggcaaatcctgatataatgttccaccaaaataagtattaataatctgcattccccgacaaatacctaaaacgggaatttgcctttcggatgctaagcgcagcaaagcataatcaaagtcatccctatcccggcaacattctccacattcaggaagagtcgattctccgtatatcacaggcgatatatctcccccacctgtcaggagtaaaccatcaataaaagaaaccacagattgtaaaatctgtacattgtcggtaaacggaagaataaaagggatgccgcccgcttgaaggacagcatccacatattttcttttcacagatattcttcccggaatatcaatttcagtagaaataccaataacaggaatttctctttttatcattctcattgtcttttatcaacttaatccacagcctgtagttgtaaagccaaacttgaatattcacttttcagcaatgattttaatgcaatgccttcttccatcaatatctttccactaatgattttaccattcaggtcacaaggtttgctactgtccacaggtgtcaaatctaccaaacgataattcttcgacggatccaatccattcatacaaaccttcggaataaccatattgatgaaatgagaaatcttatatgcataaaagaccgccttattcttttcggaagtgacatacatcagagaggatactcctttattatcgtatggagacaccaaccgatacaaatcaccgaactgaaccacaggacgaatatctttatacgctgcaatagcacgcttggcgaatgccttatcaacatcattcatgtccttcggctgaatttccattcccaatcgcccggacattgccacatcaaaacggaatttcaatggaatacgacgtccggtctgatgattcttgtccgcacttacgtgagatgccatagcaatagccggaaagaaaccggaaactccccattgcatataaattctttgcaaagcatccgtatcatcactcgtccagaactcatcaaaatatggaagcaatccataattgacgcgggcaccgccaccagcacatagctgcatcacgagttcaggatacttggcacgaatacgctgaagtactttctgtaaacccctattatactcaatatagagatgtgattgcttgttttttggtaagtaggaagaaccataatccagcaaactgcaattatcatcccatttcatataggaaatttccggatagttcgccatcaaattatcgaccactccaaaaacaaaatcctgtactttcggattagtcaaatccagaactacctgcgttttgccacgcccggtagataaaggacggttatcaattttcagaatccagtccgggtgcttttcgaacagttcgctcttagtattcgacatttccggttcaatccagataccgaattttatatgatgcttcctggcagacgcaagcagtccttcaataccttcaggcagtttttctttgcagacttcccaatcacccaaactactgtttccaccattacggggatatttatttccaaaccagccatcgtccatgacaaacaactctccacccatggcagagaaagcttccatcatctcatccatccctttttggttcaccttgaaataaacaccttcccagctattcaacaagatgtcatgcagcctttcaccccgattcattttatattggcgtgcccaatgatgaaaagcacgactcaccccacctttgccattggtactatatgtcatggcaaattcaggagtgacgaatgtctctttcggttccagtatgtattgtgaactttcctcattcataccggctattatattcagtgctgtgttgcgaacatccagcttcaacttataattaccactccaagccaaaacgcccccaaagacttttcctgtttcttcctgcggtttgccgtccaacgacaacataaaagaaggattatccgtttccgtattcgccagtccgtctttgttagcaatcactttttgcccgttcgtcagtttctcttcatccatcgtatgttccgcaccccaggctccatgaaaatgagtcagccagttgtccccgcgaaacatcggcaaataagcggaagcaaactgaaacagtgttactggtttcttacctgcattgccaatctcaacccaagtggtaattatatccgttcctttataagccttataacattgtttcacccaaacaggatatatcttatctttcaaaagaacttcggttatctctccatccttggaagtgtattgagtaaccgcatctaccgccaagtcaagtgacatattgccatccggttgagtaatagcaatcgctttctcccctaccgtctggagaccgaaagcgggatagctgttcgcattcaataccagtccggcatcatagatactttgtatctgcccgggagcaatactgactccataatattgcatctttgatggttcacctgcatttgctgtaatcaacaatgacgttttggacgtcgaaatcaaataatctttagcaaataaagaacttgataataacaaaccaatagcggctattaagctctgcttcatatttataatcatagatttgtttttattatattgatattaagtattaccttttcctgaccattagatgtattcaacccagtataatatatacttttcataaaatgcaataatacatatctgtcagtgtctgtttcttatttgtagttttcacttctattttattctttccaggggtcaatatcacatgtttccactccaagatagaataccggtctgtttccactttaccacaactctttccgttgacaaataattctgcttcaggttgattggaaaaggctataatcgtttgttgtcgctgcacacgtattatgttacgtttacctattaaataaatcataggatcctctttattccaattcgctttataaaaataaaaagcatcttttcgcactttccgatcaaatgtaaccaaccctttgtcattaactccaggacgatcaccctcggtgcggtgcgcagcaccaaagtcaaacatattccacacaaaacttccccaaacgaaaggacgttcggttatcgctttccagttttctatatgataataagtttgccaattttccggatgccaccaacttgtgggatttgttttcactagcgaatcttgttgatgatatatacttgcgccggcaccatattcactaatagcaatacgaatttcaggatattctttatgcatccagtccagccattttcctaaatcttgtggggtaccaccataccatccatcatagcggttccaggcaataagatcggtcacaaagtttatttttcctgattggttactggcagaagtggtggggcgagtagtatcttcctgatgtgccagtacattcaactcattaatgtactccaccggattatctccatattctgccaactcattaaacaatccccaaacacaaatagaaggatgattataatgctgacgaattaattctttaagctgttcttttccattggtacggaaagacggtgaatcaacgaaacccttatcttcatacccgccaggaccgataaaagggatttcagcccataccactataccaagcttatccatgaggtcataaaaataagtagcttgaggataatgagccagtcgcacggcattcactcccatttccagcatcaatgccgcatcctcttcgtgatgctcgggatgcaaagcattacctatctcgctcctatcttgatgacggcatactcctcgaagtggcaaatgttctccattcaagaaaaaaccctcatccggatctattcgataaaaacgaagtcccaaaggctgtattacctgatctagtatctctccgttatgcaaaagagagacttctacctgatacagaaacggatcttgtcgtccattccataaatgtggattattcaactctatcctcatttctttttgtgaaacagaatcaggataaagtgtaaccttttcgtttttttctttcactactttacctgcattcgagagaataatgttaagttccagttcccgtaatttgtcacttccgttagacaaatcaataagagcacgtacacaagcatattcatgacttacgctatcttgaatcagtcgaacgcccggagaagcataatccaaaggagaaatacaaatctcatcggtaactaataaatgcacatcccgataaattcctccataaaaattgaagtctccgaccaaaggcattatatccaactgttcaccattattcactcgtactaaaatagaattgtcctttccatactctactctatctgtgatttcaaacacaaaagctccatatcctcctctatgttcaccaatatgtttacggttaataaacacattagctatactattcactccttcaaaacgtaaaaagagacgtttccctttccattgtgactggacaaatagcttcttctcataattgccaattcctcgcttataatctattttaccagataaggcatcctgcgcattccaagtatgaggtagatccactcgaacttccgtacctttttgtacttgatgagaaaaacggaatttccactgattatttagcaggatatcctgtctttcagcaaagactatcgaactataacacaaaaaagcaacaacaaatgcccataaacgatgtttcatatttaccaagacttaaattacggtttcgaatagcaatatccattaacaaaaacgaatgattatctttaaagagctacttaaggtaactttctcagaaataatcattcgtttattgagaccttacttcttaattactctacatttgtcaccatctggttctgtgttatccaatgtaaactgataaggccactgattgtcagcccccgtatcatagatttctttgggagtagcagccactaccagccaaagatgttccgtattctcgggaacctgaagacttgcagatcctatatcttctttgcttggctcgccatatacacgtgaaccatctttcagcacagccagaaatccatatctccattgagcattattcggtttgtgaatattatactctgaactgtttattatacctctaaaattaacttttactgtagttccggcctccggtactgttaatttaataccgttatatccatagttgcttgggcaacgttcgggtgagatccgataagtcactcccaattgaacaagctgacaagtatgcacattagctcctctggcagcatatgccatttcaatacgcggcaaatcccaggtaatgaaacgggatgcagcatcatacatttcttcattgagttgttcttgattaatgtgagtcaaacgtttataggttttaataaagttgagttggcccgattctgtcttatcgtccaaagtagtctcctgaaatattctgctcatgatttccactccatgcttattcgcccaatactcaaacatatacggattattgtatgcattgtcattatgccccaatgatcgatgcgtgccactaatataattcgtaaaatgattaaattcctgatcaatccattccggagaacgtctaagcaatgtccattgcgaagtcatttcaaatatcgggccagggaaccaagcatctttaatacctgaatcccacaaggccaaatattggaaactgtgagacacctcatgatataccatattaggatttcccgaatgatgtggacgaatagccaactcacctaccggataatttcctcctcctgtagcaccaccctcactatcatttatcacatacacaatgagcttgtatttattcgtcacggattcttccttatttccaaagtacaaatcatatttcatgaagtcatatacttcctccgccattttcagcaaatcatccggattgaacttccgctctgcattttgtggattggtaccaaatgatttttcccaaaagagagccacattgtcgctttctttcatgtagtgcttattaaatttgctgttttcgttttcaaaaagttcaggtccgctttgtccgatcatagtatgttccggaataagtaacaccttttctacttgtgtaaatacaaacctataagtatcatcatttgcgttattagttatcacgacttcactttttttcccagggtctttagctggattggcagctaccgtaagagtaatctctccactaccactttgctcgcccgagggagtagcagtcaccaaatctccacttaccacttccactttccacgtcacttccggtgaagctgtaaccgtcaagtgataatctttaccagtaaaaggagcatttacaacaaccggtcgggtataattgcaaaccaagctcaagaaggtcacttcaaaagtaagtggcctttctctctttccgctatcgtcatcatcgttacaagctgttgcattaactgctaataacattataggaagaatcttccacatccattttaaaatattcatatttgtttcttttatgatttgatcttataaaatttatcacttaccatatatcttcaactgttgaagggcaacgcacgggtaatcaccactattattccacttcgtataatcataacccaatatattctttacactattgttactataagtcttatcacgactagatatgaatgacaatcgtaccaaagtcgctccactctctttcaaactgtaaagtgacaatttggacaaatcttcttcgctgacacgaccaatccaagttttgtctgcaaacggcagttggttatcctcatatttcaattctccaatcttcttcaaatcatcattacttgttccagcataaacaacaatttcattaggaacagcattaggccaattcctcggcaaatagttgaatgagaatgcttgggaaagaggtttatttgagaaatcaatatcgagatacacgccatataccggatctattttaggatcgtttttacctccgttaggtgaccaaatggattgccaataattattatatgcaagtagattacctacattattgcctccgtcagtagcacttgcctttagcatattcgcttctagatttatacttctcaagtcactgatcgactccacttttgtttccataatcacgtgaacataggttatcttttctttgacttcgaaaggactattaccacatccaattggaataatcggatacaaataatccttatctaaagtcaaaccatcccctgacaatgtagcagtcactaatttctcattatcttcctgtgtaaattcggaagatgataaaacgcagttgcctttgggtaataatgtataggaagtacctttatccgcattatatttatcaaccgcagctttcaaagcagtttcgttctcttcaaattccaccgtaaattcccactgattgattacatcaagagaaagattaaaaccgtaagatgcctttttctctccttggtccaaaataagaatatgcttgtactctttcgactccatagtaacaacaggagttgcaatacgaggtttcataaagatttcagagacagggaaaccatctacataaacacgaataccccaaacatattctttatcctcatccaactctcctacttcttttttaaatgttatttttacatctttcgacagatccgaatcatcaaaatcaacagaagcaggcattacaatataatcttcaggaatagacatgtagcttgtaccatacaaagagttatgtgcgttcagttcctcttctgtgaatgcagaaagagtcacttcaccctcttctttattaattgtcaataaggtagtgatatcctgattggcattataaaaatcaaattgtttcacgctccttgagatattccgatcgtatatgttcactaccaaccaaatcaattcagcctttctatcatctacagaaactattatgggcaacatatactcttcacttgtactcaaatctcctgttttcttattgaatttaatatccaataaggcagatacctctccatcaaaacttatcgaatttggcaaagtatagcaatcagtagggagaagtttatacagagtgagattatcctcattatatttatccagttcttcttggccaagtgaagaaattgaaacattaccctctaccttatttatagaagtagtataaataagttcttctttgttatatctgtcctcattataatgaatgtaagcatataattcttctttttgcgccatttgattcggatcatacgactgtgtaaacgcatatctataaatctcgtcgttaacactgtttctaatagtcactgtagctactctgttttttatattagtcgggttgctcgatgcaacaatcaaaatctctccgtccccactttgcttagtcacaggtgtggctactatccaactgccaccttcaagcttagttgtccaaattacatccacagaagattttacagtcaacttatatgtctggccctctataggtactacaacatcgataacattattactgttacattccaaatccgttgaagaaagttcgaagaatgacgaagttgtatcatcatcgtcactacaacctgccattgctacagataatagtagcacgggaatgattctccatatatttttcattaaagcttccatatattttcgtttttattccttcacaattatttaccatacaatctaaatcctgatattgcgaccgagttttggtctccacttatggctccggattgtgtcaggtttttaatttgtgtaccattagcactagacaagaaagagacacgaattaaagatatctcttgacgtcctaccgagaattgaggcatatctacattttgttcagagtcatctgtccaaactccaccttttttaggcaaattatttttcgttgcactcaactcacccacttttctcaaattatccacactcgttcctacataaagaataatctgattaggtacagcatttgcatactctctagtcgaataatcaatcttaatttgcttctctatcataggagtaacatcagatacgtcaatatctatatacacaccatatttcgaatcatgcttagggtctgtattgcttgtccaaatagattcataatatgttttaatatcattatcaagcatatttctgagtggttgaccaggatgtatactattggaactcaacatatcatcagccaaagaaattaatttcaattcaccggtaaccatcacatgaatgtaacagattgcttctcttacatcaaacggcatacccaccacctttttcggaataattggaagcaggtaatcatccatcatgagattattattattcacctccacaaaagaggaagcaagtgcctcgcctgcaggaaaaagtattgttgattcaaacgaacgattttccttaggtaaaagaagataatcaactcccatcgtttcattatattgccttacagctttttccaactcatcttcgttgttctctattctcaatttgagatcccactcatttttcacgtctaaatagaaagcaagctcaaaactttgtttctctctcttaccctcttccattctgattacatgaacccccgtaggatccgtaatgatgctaggtacgatgatgttcggcttgaaataaatgatatttttgttatcattcaccgttccattatcagcttctaaacgaatggggagcatatactcgccggtcttagccagttcactcatatttcctttgaataccacatctacatttctatattcgacaccatcctcaaaggctactgtagcaggcatatcatagtattccggagctaaaagtttataatcgccatctatagttgcattatactcgtccatttcagcctgagtaaaaggaaccaaattgatagtgctgactccattcaacccatgtcctcctcttccaacagtgatggtctgaactttggcactattcacactatagaagtcaaattcattaaccccctctttcagataatagtagacagagtcaaattcctccgtatagtttttattaccatcttcacaagagagagtggtcaccactactccgagaagaaataaaatatatatatttttcatactgtatatctttttaattaattaattgccataaccgggagcttgaaccaattgcggattagaattcacatcaacatagtaaattggaagtatatactgtctattattccattcataaggttgattcaccttaatacgttgcctgaattcgtcatactccaatcctttttcttcagctctcaatccttcacgctttccagcagccaaatatttacctccttctacccaacgtcgtacgtcaaagtagcgctgtccttctgcatagaactctacataacgttcgttcttaatccattccatcaatggcatatctgttaaatcctctttagtaatggccttcaaaccggcacgttggtgcaccgcattaagattcttaagcgcttcagtcgcgtaagtatccgatttaccatccgaagacaaattggcctgacattctgctaacatcagataaagatctgccatacgaatcaatggataggcaggattcggaattcctccaccaccggataagtccagttgcgtgttaggatccaggaacttctggatagcaaagccggtcaccaagtgattacggttatactttgccggattatatccttgtttatcaggatctctcgtatctatttgaatcggttgtccattggctagacgagaagaataatcgccttgatggaatcccaaccatgcataaaatcgaggttcacgagctacacaaatattaaagagttccgaacggccagtaacacccgccgggtccaaccatttactttcagcaggatattcattctttgatgcagcgattttgggcaaggtccctttattggtatagaaatgttctacagcatataaataaggagaagttgagctccaacctccatattcagaaccattgttaagtttcattatgttgtttggtatacttccgaagacaaagttggtagttttgtgtaactcccacagaatttccagattgccatcactgcctttggctgtcatcatataacgcaaagtcaatactttattctgaaatgccttaacttcagtatcggtcccctctatattaggaatatagggcatcggaagtcctttctgctcctgcaaactttcatcgccagctcttgtgccaaataaatagtgtcctgcatccaaagctgcattcaatgcttcttgagcagcttcctctgcgcgtacccatttctcacgatcgtatgtagtactcaccaacgctgtaccgtatcccggagtttccatggcctttcctaactttacgtttttccactctgggtaggggaactttccattccataaaggagaagctgcataaagtaatacttttgctttcagtgcaagagcgatagggcgagtagctctacccacttctgtgttcgaacgagtattcctcaacttatcacctgcaagtaccttttcatccaatagccgaacaatccaatccgtcacataatcatagtgcatacgacccggatattcattttcactagcggtctgtggaagtaatctgtcgctgatgggacaaggtccataacaacgcagcacctcaaaatggtaataggccatcaggaaataagcctctgcttcccactcctcttttatcaaatcacttaccggtgcctttttcagttcctgtaggaacagatgaatttgcccgatatatctgtaatagttactccatttaccaccatcattattattacctgtaaatagattatgagctactttgagtgaattataaccttgcaaactatactcaagcggaacagcatattcgtctgcagaggcttctgtattttcaaaagctacaggcgattgtattcctgcataacaagaatgcaagaaccccaaagtgctgttgaaatcttgtgttgcgtcatccaaatcagcttgttctaccggaacaatctcaaggaaattacaggaggctgttaagcagcatagcgagatgaacaatgccccacttagtattctaattgtatttaatagtttcatatatgacaatttttaaaggtttagaaatttaattgcaatcctatattgaatgtacgttgcaacggatatttataccactccaactctggatcccattctttgaatggactgaaaacagccagattatccccggtcacatagattctaccgtatctgcagaaacgatatccgatttccaacgtcttgaaacgtaaaaaattaccattacgcatccagaatgtactcggtacaacgttattgtctgagtttgctttttgtagtccaagacgcggatatgctgcattagggttagggttagcttctgtccaatagtccttcgctacaaatttgaaaatgttgtaatcagactctccgaacggatgaatacctgttaacataatcttgcgcatagccgaaccgttaaagaacactccaagatcaaatttcttatagtttatattcaaaccaaatccgtattgtatacgtggatttccaccatattctgaaatcattccctgatcatctgcattgattacaccatcaccatttaaatcacggtatttgatatctcccacttgagcggtacttcctagttctaccttaggaccgtattttatttcatcttcggtctgatataatccttctgctatgtaaccccatgtcgagttcaaaggacgtccggtttctcttttccatgggtacggtgtatagggttcatctctatacacatatttgttctccacatacgtaaagttaccacgaaagtccatagacaagtccttgttaatggaatgatgatagttggtactgaactcccagccccagttgtctaccttcccgacattactccaaggtgtggcactatatcccaattgacttggccatgtttttctttgcatcagaatgttcgaacgtttttcgtagaaataatctgccgtaatattccaatgacggaaaagtgtcatttctaaaccgacatccaacttcttagaacgttcccagccagcatccaatacataatagcttgaaattttcgggccaccaaatgtagtttgccaatcataaccggtactatatttgatgttgtctagttccactttatccaaataaagaaaatgaccaaagtcagtgcctgtttcatcactacctaccaatccataagatgcacgcaacttcaaattatcgattttgtcacgtaagggttcaaagaaagcttcattgctcactacccagcctaaagaagcagccggaaaaaactcgaaccggtcaccttttgccaaacgctctgtgccgttgtaaccaaagttgaattcgagtaaatagcgctgaccataatcatatgtaaaacgaccggaaaaaccttggttacgattaggaagcacatccttcttaaaatcacgctgcatatacatcaacataccgcctacattatgtttgccaaattgacgtgtatagtttatctggaactgcataaaaatagtacgatcaccagatctggttataccggattcagcaatatattgcttgcctgaagtgcctaaacgttctaattcgtatgagacaggattcttggggtcgtaagaattttctttcactcgataataataaggttcaatcgttctgttatattcagaactggaccagtttttaaagttcaccaatgcgtttgcactcaaaccttttgtaacaaaatccaagttctgcttaattttcaatgtagtatgtagcatatttgagtccacttgtttaaaagtggtggccatatatgcataagggtttattcttgtgtaattggctgtaagaatggaattaccatacttcacatgctgatcgccttcctgtgcaggaaacacggccggaaagtttatagggtttgaagataacatcattttaaataaatcatcgaccgaattcttaggaccgcgattattacgaatctgcgtattcatgttcaaatcgattgtagttgtagatgtcactttcacagagatattattttggaagttataccccatgttattgatattattgttccatgaataatacttgggtgagtccaacaaaccagtatcgtggttcacatttaaactcatataataagttactttctgaccaccaccagatatattgatattcgcacgttgattagtcgcaaaatccttgaatatcaaatcaccccaattcacatccggataaacatatggatttaacccataacgagttccttcaatttgctgtctgctatatcttccttgcctaattgacttattacgagtaagttcagcttcattatacatttccatccaagtggctccatctacaaactctggaaagttcattggtttattgaatgaattttccaaagtgatgttaatacgggtttttgaattctcttgtcctttcttggtagtgatgagcatcacaccattcgcaccacgagcaccataaatggcagttgcagatgcgtcttttaagatagaaaaactttcgatggtttcggctggaatattgtccaaatcccctgtagcaatttccacatcgtctagcaaaatcaagggagtagctcgtccaccaaaagtcgatacaccacgaataaagaattcagaagctgttccaggttctccgcttttggtattaacgattacgccggccaatttaccggccatagagctagtcaacgaagaactaggagctttaagttccaatcctttcacggtagaaatagcccccgtaacgcttacttttttctgtgttcccgatccgacaatcactacttcgtccagcatctcattatcggaagtcaacttgatatcgataatacctgaagtctctacaggaacctcccgagttttatagccaataaaagaaacgactaagatatctttggtactattaactggaatagaataattaccatccaaatctgatattacacctgtttgagtgcctttcaatgcaatattggcaccaataatgggactgccatccaaagcgtccgtgacagtgcctgttacttgtcttttgctttgctgttgttgagcagacactgcccccttaactccggagtcagctatcgccggtaggctcgtagtgccggcaactataaaagctcccaacgttacaaaagcaatccttcttaaataatacttcataagctttttcttataaaattagacatcagttaactatatattttttaaatttaaaattcatcaattatcacccaaaaatcattttttattcacatacagaaaggggtatttacacaatgctcatcaaaagcgaatattcctttctacactacaaagaaattagtcaacagttcgcactccaatttcagctacacttataaaattcttctccaacacaccattgaccacaaatttcagataacgtgaccgataaaccttatttaacttaatttcttgaggcacaagtgtctgcctaatgttctgaaagacaccctttgaagccatttcccatttcagtccatcttcactcaaataaatttcataattttcaatgactccatccacatttctatacatatcctgacgtggtgtgtaaatgatctcggacacaggaatagtagttcccatatcaacaataacctcgtcgggtacaaattctttcttattaccagcatcatacgtatggaagtaactctctacattatcatcaatcatattatcaacaccagatttaacaggtgatataattttccaattcttcttgcactgatcaaaaatcactgaagtaatctctccactttttttatcagatgtaaaaactgccgctcttacaactccctgtttatcaaaaaggaatggctctttatactcatttgaggtaaatgacggttcggttccgtctgttgtatatcggatagaaattacaggccggtctgttcttatactcaccattccatccttctttctataaatttttggtgcttctaaattatcaggttctttaaacagacttacttcactcacagccaatgctactggggcaaaaaagcgtaaacggattctgtctgtattcaaatcattctcaagacgaataattcgacacgcccctatgctggtagcctctgctatttctttccagccaccatctacccaagcatcgactttcatagagtcgattcgttgacctaattttatgttttcacgcacttttatcagattaaaaacttgtttctttggaagttctatcatcaatgatgcatttgttactgtatcgtcagtcgcccaataagaataccggtcattgtctgtaagctttgcagtaccataatgcctagttatattcccacgcacattagatggcaccaaacgtgctcctttaataaaatttttgctaaaagttttattcattaattcagcgaaaccttccaaagatttgacatctctccactccattactccttttggagttaaaggaagacacatatcaaatccctgccccaacccaacactcgcaagatagatatcaaataatttttgagggcttttagtagtcaagctatctgtagtatgataagcaaaacgcctttttagcgaaaagtcacactctgccggaatccaatatttcccatgtcgttgtccctcattcaacattttaatccgctcaccgtcactattagggcgtggtctcatgttccaatttccttcagggaataatgttgcccaacaagtttttttatatcttccggcatatccatcctcatttcctacccaacggatatcaggtccggggtcattaaaaatgacagcgttgggttggagttctctgacaatcgcataaatattatcccagtcataatattcgatgaatccgccacgatattcattagcacctccgtaatatcccgaaccaccggcacctggagcaccatcaaaccaaagagtaaacagttctccataattggtacacaattctgttagttgttccttatacattttcagatattcgggcgttccgaaacatgcagcatttctatcccacggcgataagtaaagtccgagtttaagcccatgctgacgacaagccttcgcccattcgccaacccaatctcctttgccatctttccaaggtgatttagaaatattataatcagtggttttcgttggccacatacagaacccaccatgatgctttgcattgatgagaaatcctttcgaacctattttttttgcaagaagaactattttttctgcgtcaaaatctacagggttcactagttccggagactcattaccccatccccaatgaatatcaagtgcattgttctgattgaattcaatcatattatacatttccatttcatgccaagctagttgacgatctgtaggcaataccccatacggttgcggtggatccattttagtggagatacaagaagctaacatagctatacataacaacgtgaaagataatttacaactcataaatattagtattataaaagattaataaggttaatacaaaagagatatagcttagtcttaaaaaacaatcaaatcatcttctgcgccactaaggtagacgtatgccagtaaaaccaaggcaaattgcgtacaaaagaacaacaatatagtaaaacgtgagatcttttcacttactgctctgtatttcaccaattattatcctagatcatgtaccattttattgctcatattttatttctacaaacaaatctcttttcactatcaggtcactttcatctaaatagaataaatatcaagtactttattatcatatttttcaatccgataccacacttttcccatctcaaataataacctccataaccagatacttcaatcattccattacaaagtatctggatgaaatgaagtcttactgatctttatccgatatggccattcagcaacttgctccattttctgatgatatttcgtatgtttatctggtgctcctgtcacgacaagccacaagaactgggtatcgtcaggaactataaaattaacagtttgattcacgctatttacagctctattcatcttactataaactctctttccattcttctgcatggcaacaaagccgtaacgccaccctgcatacaccttattttccgaataaaaaccttcatttccagccattccctcaaaagtcaagtctatgactgtccctcctttaggaaccttcaatctaattgcattataaccataactttgtggacaatattcttttgttatttgataccatccgttccccattttctttaatttacaacgatgctcattagcataagaactacaaactgattttatgcggggaagatcccaagttacaaaacgagttgccgcatcatagatttcttcattaaacaaatcttgagaagtcttcgttattcgcatataagtggacactgggtcctcttcttttaaagcttcactccacattctgcctatcaccggcaatccatgcttataagaccagtactccataaactgcggagcgcaatattggttcgttttatgaaacaatgtataatgtgtctgtttcatgtaattattcaaatgataattctcaatagtcacccagtctggatgtacctgccatagcatccattgagaagtatactcatagagtgtcgtccccggaaatcctttgccaccatctgcctcaaccataaactgaaaagaatgccctaactcgtgagcaagtgtacagtaaggatacccgtttattctgcacggacgaaaccaggtcattccgacattgtcatgagcaccaccatagactgtcttctcattgtcatcatacatccatataatcatcttatacttatcagtataagatttccctttctgcacaaatttcaatttgtctacaaaataacgatagtaccgttcgccctcactcaatatttcattcggataaaatcgtttactctcatccatgtttacagcaggttccttgccaaaagacctctcccagaaaataactagattatcagattctgccatacaatcatagccaaatctaccatcaggaacatcaaaaccgtgctttttaagatcatcttccggaataaaaataattttatttcccaacttagcctgcaacatttgtatattaagggccaacatcaatccacaaaacaaatagataaaatttcgcttactacagcacatattactttacttttaaaatgttacattaaccgtataagtatcattacctgtttccaaatgctctctctgtagttccacatcaggaagccatacatatttcttttgtcccacctcatctattatttctactagaaaactaaaccaataagaatatgggaataaatcttgtggttctttgggaggaatattggcatctgtcatatccggatgatacaacttatacaaatcagttatctcaattatgcctcgtttactggtagtgtatgttctgtaagctttcggatatacatcccgcttattatatttaccaccggcacgagttccataaaaattcactgtacaattagataacggtttccccattttacccactttaatcactagtttacgaggaaagactttgtccgacaagtctttatccagtggtctcatttttgctgtataattgaataaagccgaacaataatcactccagacgcgatatccagtccccatattacatttaggaggagttaatttctcatgacttaccggattatcttctgcagcaatcatatattgatataaatctgtagcaccacgcacatgtccatactcgtgccctagattactatatgtcccctgatcgggatatagcgcatctgtaaaaatgttatgagcttcacgaacataacacatcaccaccgactgcccactggctccaccgccaccacaagatagtccttcattctttgcgcccaacgccagaaacaacacaaagtcatatttcgacaaatcaagccgaccgaaagcctttctctgaaactctccgtatctgtctttatctccctgaatatcatacacacacaattcgtcagcaggaacaaaccggaaataatagttaaacttattgggactttcattccaaaagcgggttgtattatgaaacatctgctgcaaattctttttaaaagatgcttctccgccataacgttccaaatcgattttatccacccatacttgcgcacgatactcaatcgtatctttcacctccacacaaaaagcatgagtcgcccaaaccagacaactgcatgctattaatatacactttagaatacccatagattttcttttagatttataccgtattataattcagttgataccctgataaaatacgttttaccagaatatcatccgctattgccaaactccagtaaggttaacttatgtttttatccttttcgaaacaaaagtatgcaatagaacactttaacaaggctaattatgtacaaaagagcaacaatatcgtaaaaagaaaaattgaatatttaattttatactaaatttatccggaagtcacaaaaaagaggatattccaaagaatcccctcttataatagactcctgaattattataaaatatcaggtcgctttttatatataccacagaatgccctgtcccatatttctacagaatagaatagttgcctgcaaaatttgcttgcctacaatatatttggctgtcttacttccgctccccacattcgctgacacttgtacggaagcagaaacatctttcaaaagagtgacggtatcctttcgatatagtgacggtataccaactagatagtgacgctattccatacatataccgtcactataccaattcctactttatatagactacagaacgccctgaaccatacttcttcaagacaccatctttgataaaagcattgatatcctgcaatgcctgtatcttcgtttttcccacaagcatagcataatcctgacggttgatgcacggatggtcttccaagaacttttccaaccgttgtaagcatctctccctatccaaggggttcttcacacgaaaaggagaatgataacgttgtaattcaatctcactctcaatatcctttttaaactgccgattgacacggaaattaatatctttcagagatacggacggtgaacgcaagtcttttggatccatcactttcttgtcaacactcaatgaaagggagaaataaccgatatcgcccagctctaccgaaaatcctttcaaaagcaaatgacgtagttcttttgatatagcttctataacgccgaccacttgtgcatggggcatatgctgaaatacggtcacttgttccacaaattcttcggctgtataactgcccttcaaaacgacacgtgcatgcaaaggctgttcttccccacttttagcaagatcgggagtttcataaagatcataatttacactcattatcaattagtttttcaataggaaagattaaattcctctctcctatggattaattttctaaaacgcattcctattttcgtttgacttaagtcaggcgatagttcaacttaagtcatcctttcgtttaacttaagtcaaacgaaaaccgatatgctaacgagacaaatgtacatagaatatacagatactaatctatgcaaagcgagatttaatttcaactaatgaattatcccaaagcccacaaccatattaaccaataattatccaagatttgaacgatttttttgttcactttcaaaagttttattccacacctaaaaagacagcctatcatttgcttttgctactaattcttcctaatattgtcctatactaatgaaaactaatacaacataaagaatcccccatgaaaaaaatcgttcttttgataactatacaaatcctgtgcatgcattcatttgtcgtgaatgcgcagcgtatcttctccacctcctatacaatggatgatggactggcagccaacagagtatacagcattttgcaagattcatgtggattcatgtggttcggtaccgatgatggattaagcagattcgacggtattgcattcaagaactactatctatcagaatatatcaacgcaacaaccagtaacagcgtcaagaaaatatttatcgaccgcaggggcagaatgtggataggattggataccggaattgtcatttacgactcgaaaacagacactttccaacctttccatgccaaaactgaaactggagaaatgatacaaacctacgtcaccgatatgatagaagacagtgacggagaagtatggattgcaacgagtggagaagggctttaccgtttttctccatctgataaagtcaggcttagagtataccggaatattcccggaaagattaatagcatctcccaaaacattatcatgacattgcagcaagacagtaaacaaaacatttggataggaacctattcggaaggattatgctgctttgacaaacagaaaaacacgttcgtcacttacaaaaagagcaatcaccctaatagtttatcagataattccattcagaaagtgtttgaagactcacacggcaatttatggataggaacttttcagaacgggctcgacctgttcgatcctgtggctaaaactttcaccaactaccgggacagaagtccgaacaacctattatatcatatccacgacattaaagaatacagacctggcgagttgttcatttcatccgacaacggtatgggaatttttaaagcagacaaaggagaaattatacaatccgacaatccgaatctgaaaataagaaccggagccaataagtttatatataccatctatatagataaggaagaaagcctctggctgggctcctatttcgatggaatcaaattctattcggcatttcagaataatttcaaatattatagctgttcatcatcgtccacgccacaatcaggaaaagtaatcaatgttatcaaagaagacaaagatgataaatactggataggtacggatgacaatggcattttccgatttgatgccaaaactcaagaaattacccctttccgggatgcagccagtataggcacaacttactattgtatacacgatctgctggtagacggagataaactatatgccgccacttatggaagaggtttggaggtgattgatttaaaaacaggaaaagtggaaagttttctcaataatccggaagattcaacatctatcccctcctcacgggtattcactctatataaagccagtaatggatgtatttacgtgggcacttctgcaggattctgttactataaccccgaaaaaaacaatttcatcagaatcggttcttttacaggcaaaatatcggatatcattgaagattacttcggaagaatatggataggaacaagcatcagtggattatattcatacaatgtcagaacccaaaagataacatcttatcaacgttcagaccatccgaattcactaacaaagaatgtaatcaccacgctagctatcgacaacaagaaacgactatgggtgggaacttatgggcaaggactttgtagatataatgatgaaacagatgattttaccagatacgactacctaaagttgccgaataaaatcatcacttccattatccctaaaggagacttattatggattagtaccaataagggacttgctgtatacaatccggatacagaatatctaaaaacctattcgaaatcaaacggactatacaatgaacaattcacaccctgctccggctttgaatcttctgacggtagactatttctgggttcgacagacggtttctgctatttctttccgcaagacttgagagaaaatacatacaatccacctgtcatcctcactaatatgaccattttcggaaaagacatacaggctgacacgcccaattcacctattcaccagtccataggatatacagatgagattgtgttgaaatataaccagtccatgatcggattcgattttgccgcactaagttacattgctcccaaagagaatgattatcaatatatgctggaaggtctggacagcgaatggcagttcactaaaggaagtaacaaccatctttcctatgcaaacttacccgtcggtgaatatgtattaaggatcaagggaacgaacagtgataaactatggagcagcaatgaagtacagctaaaaatcaaggtgctgcctccattcttccggtcgcaactggcttatctgatctatgccctcgtcctgttgattgcgattatgttaaccgtatggtattacgtaaaacgcacggagaaacgtcagaaagaacgtatcaagaggctgaacgatgaaaaagaaaaagagctctataactccaaaatagatttcttcactaacattgctcatgagattcgaactcctttgagccttattatcggcccattggaatacctgatgaaaacttcaagtatcaacaatgtgtatggggaatacctaagtattattgaacagaattacaaacgcttgtatgcgcttgtcacccaattgctggatttccgcaaagtagatacgggatcttataaactatcgtatgactgttaccggattaaagaaataatctgcaaagtaagctgcatttttgaattatctgccagacaaaagaaagtggcgattgacacttcttctatcccggaagaactgagcattgtcatagatgaagaagcttttaccaagattatcagcaatctactaagtaatgccttgaaatatgccaaaagcacgattcgtattacgactatagaaaaggattccgagatagtagtcaccgtgaccgatgacggtataggcatcaccgatcaagaaaagactaaaatattcgacgcattctatcaggttaagaacaacagtgaaataaataaactgggcattggtatcgggcttcacatgacacgctcactcgtccaattgatgaacggaaagatcgaagtcagcgatagggaaggcggtgaaaacggtgtttctatttctgtatatttccccaaacaagcggccatcactgctttgccacaagtggccaaacgagtggaagatacgattattccagaaaacagcatagaagaaaatgaactggaaagcactcttcccggtgaaccgttgaaaaaacaatatgccattatggttgtggacgacaacccggagattctggatttcctttccaaaattctgtccgaggaatatttcgtcatttcggcttcaagtggagaggaagcgttgcaaattcttgaaaagaacaacatcgatctcatcatcagtgatgtgatgatggaggaaatggacgggttcgaactctgtgggaaaattaaaagtaacatcaatatttcccatgttcctgtcattctgctgacagccaaaacggatacggaaagtaaaatcaaaggactggaagccggtgcggatgcatatatagagaaaccattctcacctttccacctgaaagcacaattgctgaacttactcaagaaaagggaaagtcagcagaaaacgtatgcctctactccgttgtccgatctgcactccgctgtccacaataaactggatgaagaatttatgaataaatgtaccgaaatcatccagaataatattgaggactccgaattttcggtaaatacactggcacaggaactgggaatgagccgtacctctgtatttaccaagatcaaaggcattattggcatgactcccaatgatttcatcaaggtcactcgattaaagaaagcctgcaaaatgatggtggagggagaatatcgggttaccgaaataggattcctcgtcgggttcagttcttcttcctactttgccaagtgtttccagaagcaattcggcatgttgccgacggaatttctcaagaaaataaaggaagacccctcatccgcaacaaaataagccggcaagcatcctcccattaagctaaatcttaagatttacagatgtaagagtaaacatcaacactggtaaatcttaagattttattaaattctccttataatataaggtagggagaatctttttttttacttttgtccccgaatattgtggtacaagccattataaaagaaagaattatgcagaaaaaccttgtcattgtcgagtctccggcaaaagcaaaaacgattgaaaagtttcttgggaaagattttaaagtcctttctagttacggacacatacgcgatctgaagaaaaaagaattcagcatcgacgtagagaagaattttacacccagctacgaaatcccggcagacaaaaaggctctggttaacacactgaagacagaagctaaagacgcagaaaccgtatggctcgcatccgatgaggaccgcgaaggagaagcgattgcctggcatctgtatgaggtcttaaaactaaaaccggaaaacacaaaacgaatcgtatttcatgaaattacgaaaagcgctattttaaaagcgattgaacaaccacgcgacattgacctcaacctcgtaaatgcacaacaagcacgacggattctggaccgtatcgtaggtttcgaactctctcccgtgctttggagaaaagtgaaaccggcactttctgccggacgtgttcagtctgttgctgtccgcctgatcgttgaacgtgaacgtgaaatacatgctttccaaacggaagctgcttatcgcatcactgccgtattcctcgttccggacacagacggaaaactggtggagatgaaagctgaactggctcgccgtattaaaacaaaagaagaagcaaaagctttcctcaacgcatgtcagggagcaagctttgccatcgacgatattactacccgcccggtcaagaaaacacctcctgctccattcacaacatctacgttgcagcaggaagccgcacgcaaactgggatataccgtagcgcagaccatgatgctcgcgcaacgcttatacgaatcgggattcatcacttatatgcgtacagactctgtcaacctctcggaatttgcgacagcaggcagtaaagacgctatcatcaaaatgatgggtgaccgctacgtacacccccgtcatttcgaaacaaagactaagggtgcacaagaagcgcatgaggctatccgtcctacctatatggaaaaccagtctgttgaaggaacagcacaggaaaagaaactgtacgacttgatatggaaacgcaccattgcctcacaaatggcagatgcggaactggaaaagacaactgctaccataacaataagtggcagtagcgatgtatttacagccatcggcgaagtgattaagttcgacggattcctgcgtgtataccgtgaatcttatgatgatgacaacgaacaggaagatgagagccacctacttcctcctctgaaaaaaggtcagaagttggaacacggccctatcatcgcaaccgaacgtttcacccaacgtcctccacgctatacggaagcaagtcttgtacgcaagttggaagaactgggtatcggacgtccgtctacgtatgcacctactatctctaccatccaacaacgcgaatatgtggagaaaggtaataaagacggggaagaacggcagtttaatgtcatgacattgaaagatcgtcagattaaggatgaaaaccatactgaaattaccggtgcagaaaaggcgaagttattcccaacggataccggcactgtggtaaatgatttccttaccgaatatttcccggacattctggatttcaactttaccgccagcgtagaaaaggaatttgacgagattgcagaaggagaagtgaaatggacttctatcatgaagaatttctatgataagttccatccgtctgtagaaaatacattggcaatcaagacggaacataaagtaggcgaacgtattctgggagaagaaccgggaacaggtaagactgtttctgttaagattggccgcttcggtcctgttgtacagattggtactgtagaagatgaagaaaaaccacgctttgcacaaatgaagaaaggtcaatccatggaaaccatcactttggaagaagcactggaattattcaaattacctcgtacactgggcgaatatgaaggaaaatcagtaagtgtaggtgtaggccgtttcggtccgtatgtcctgcacaataaggtatatgtatcgctcccgaaaacacttgacccgatggaaattactttggaagaggctgaacagctgattctggagaaacgccagaaagaagcggaacgccacatcaagacgtttgaagaggagccggaacttgagattctgaacggacgttacggaccttatattacctataagggttccaattataaaattcctaaagatatcgtcccacaagatttgagtttagctagctgtttggaactcatcaaattacaagatgaaaaaggaccagcgaccacaaaaaaaggacgattcgcaaaaaagaaataaaaaaactagaaaaagagcaaattatataattaaatgtatatatttgctctttatcttttaatacacaaacttatgaagcaaacaattttaaagtatttaatgataggagtacttgtcatatcttccatcagttgcatggataaagagcgtgacttatcctgggagagaaggcatatgccaaaagaagcatacttcgacttcaacatgatccaagccgttgctttgaatatcaattattgtttcaaaagcgacaattatcgtgtcctttttgacatttacgatcaagatcccattgaatactcagctgacggcaccgtgtcccaaaaggacatagagcctatctatcgtgcagttacagacgaagaaggcaaattcagcggagagatgaatatcccggcggacatctcggaagtatggttatcatcggattatttagccaccgcatctcctctaaaactaacgattgacgacagtcgtcggctttcatttaatcaagatgcatatatcactgccttacgttcacaaacggcatcaaaaaccagaggagtgaccgtgaaccaacatacctatctaaaagaatggcatgttcttcccgatgcagactgggataacaacggaagaccaaccaatctggagcctaaaataaacatacctccggcagacgtattatacaacatcaagtatgttttcagaaaggttacagtcaaagatgaaaacggtaaaagcaaggttctgaacatcagtcagaattatccggagttttttgatggttccattaaaatgacttcagatattccaattgttaacccgaccgaagtgagccttgtatttataaacagctctgctgcatggtacaatacagttggatattacacctatccgaccaacaatccaccccagagcgcgagtgatataaaacaaataattgcattcccaaacacctctcctgtttacaagactttaggggtaggagcattagtgtgtggagaagaaataaaactcaaatattggaatgaagagacacaggaatacgaagacaaatttcctgcaggagtcacaattggctggtgccttcaaggtatgggattcaagagcaaactcacctcagaaacagataaagacaaagtgggcgatatcataaaaggtatggggccacgctactctaccaggaatctaaacacgaataatacacaaaggaccatatctctccgtgattctcagtccgggcagattgtagcagtaggattcgaagataatattgacttcgattatgcagatgccatattctatattcatacgtcagaaaagaatgctattgacccggcattgcctgcactgcctgaggaccccgaagcaatccccgagcaatataaaatttcctattccggtacactggcttttgaagacttatggcctaagttaggtgattacgatatgaatgacgtaatggtaaagtacaccagtacgatgacccgaaatgctcttgacaatcgcatttacgaaatagaagacaagtttatcttacagcactgtggcggttatctgcaaaacggatttggatatcaattacacagctctcaaacagcaatatcaagagtgtaaaaataacggggcctgatgccagtggtttatcaagttctatatacatggaaggaaaagaaacagagcctggacagtctcacccaaccatattgttgtatgacgacatgacaaaattcaaaaatatcactgatgaatcaaagaaagaatatactgtaaccatcacgcttgatggagctagtgagaaagaggtggtacctccttacaacccgtttatcttcatcagttccaacgagggtagaggcaaagaattacatctgataaattatcccccgactgataaagccgacttatcgttactgggaaccggaaaagacatctacagaccagaagaagggatgtattatgtttctgcagacttgatgccgtttgctatcaatatgccggtaagtaatctcccggttccagaggaagggaaacgaatcgatcaatcatatcccaagttctctggatgggtatcatcgaatgggaaacaaaataaagattggtacaaataaagattgatacgatttaaataagagcagcccggatattgtacggaatcgctatcgggacttcgcattgcgaaccatcgatgaaaaagacataatagacatccgtttagaaaggcgcgaattacgcagttcacacaacttcttgaatactcaccaagaattcgtgtgaactgtgtttttattttaagccacaatattataggatataagtattatccgttatgaataggctttcatcattaaatcttcggctcccattttatcttaaaacctttattagggaatagcatatcaaacacaatcacgaatataaaaacagatgttaccaagatattcatcgtcaataaagaaatgtgataaggccagggaagcagtaaagccaaagctattacagcaataatatgtgataaaggaagcatacggcacgtgacatatttatagatactatttgccagaatataaacgattggtccgataatcagaacaaaaacaacttccgctctcatttcttgttcgggatgggcaacaatcagttcgtctcctaccgcacaaataatcaatgctcccaccagtacgatatgaattgcattataaatcaaccccagcttgccgggatctttcacttcctgtattttccggctaccggcttcactgctcacatcaaagtaaacccaccacatagccaaactaccaatgaaagatatgacagcagaaataatcacgagaggcgtccattcttctacttcactcaaagaagctcctgtcatcaatagagtttctccaaaagcaataatcacaaacaactggcaacgttccaccaaatgatgcccttcaatagtccattccttgctactgtccgaacgtcccagacgaggtaaagcaaatccgtgcatcggggctgtataatcacagatggcggctataatccacagtagaatttgccattctccctgcaatatggcacccgtaatccaaaagacggcagatatacagaaccagcccataattcgcttaaaattagcagccagatgatgatctcctaacaccccgataatataaagtgttctccctgcctgtatcagaacatagcagacagcaaatatcaatccccggtaagtaaaggcataaggaatggcagccgccatcaccagccccaccagcatactgataaaaagaagaatacgtatcggccgggtatccgggttgaaccagttagtcacccagatggtatgttgccacaacatccagactgcaaaccacaggattgtttctttcaataatccttcccaagtgagattatgaagcagataatgtgaaagttgcgtgaccgagaaaacataaatcaggtcaaacagcagttcggaataagagacagtagcagtttccgtttctctcttccgaagcaatggatggggggagtaaaacatacgaggttccttttatatatataaaagaaaccccgcagaagtctattttgttcagagaaagtcttacattctggaaggaacttcgatacccagcaaattcattcccaagcgaacaactttagctacattagcagacagagcgatacggaatactttcactgcctcattctcttcgcgcagaatactatagtcatgatagaactgattgtattctttcaccaagtcataagtataattagcaataatagacgggctgtaatcttcaccggcttgttttacaacagcagcaaagtcggcaaccatctgaatcagcccttcttccttttcactcaattcaataccagccggaatctgttcaggaattacgatacctgattcggcagctttccgaagtacagactggatacgtgcataagtatattgaataaacggacctgtattaccattgaagtcgatagattctttcggattgaatgtcatattcttacgggcatcgactttcagaatgaaatatttcaatgctcccagacccacaatacgggcaatatcatcagcttcttcctgtgtcaaaccatccagtttgcctagttcttgtgaagtttctttagcagtggcaatcatttcctccatcaagtcgtcagcatcaactaccgtaccctcacgggatttcatcttaccttccggcagttccaccattccgtaagagaagtgtaccagactcttaccccattcgaaaccaagtttatcgagcaagatagaaagcacctggaagtgatagttctgttcgttacctactacataaatcatcttattaatcgggtaatcggcaaaacgaagtttagccgtaccgatatcctgagtcatgtagacagaagtaccgtcaccacggagaaggagcttatgatccagtccttcggcagtcaggtcggcccatacggaaccgtcttctttcttgtagaagaaacctttttccagaccttccattaccttttcttttccttcgaggtaagtattggattcgtaatagatcttgtcgaagctgacacccatcttcttgtaggtttcgtcgaatcctgcatatacccagttgttcatcatttcccacaatccgcgtacttccggatcaccggcttcccacttcaccaacatttcgcgggcttcctgcatcaatggagattcagcttcagcctttgctttcgcttcatcgtcattcattccctgcgctgtaaatttagccatcagctcctttacttccgctttataatgcttatcgaaagatacataataatcacctaccaggtggtcacccttcttacccgaagtttcaggagtttcaccgtttccgtatttcttccatgccagcatggacttacagatgtggataccacggtcgtttacaatatttgttttgactaccttattgccgtttgccgctacaatgttagccaatgcgttgcctaaaaggttattacgcacgtgtcccaagtgaagcggtttatttgtattcggagaagaatattcaatcatcaccaatggagaagcgtcagtgacctgcactaagccgtactgttcatctgcctgaatctcgttcagcaactcaatccatgtagccgatgcaatagtcaggttcaagaacccttttatcacattaaacgctgctacagccggatcgtttgccttcagatattcaccgatttcctgtgccgtttgctccggtcctttttttgacatcttcaggaaaggaaataccaccaacgtcaaatgtccttcaaattctttcttcgttttttgcaactgcaccatcttttcagggacttcctgaccgtaaagtgctttgagtccgctgataacggacgctacaagtttatcttctatcttcataatcaagttatttcttgcgcgcaaagatacaaaaaaaggagacgcatcacgtctcctctcttaatttctttcaactatctatcttattcaacagctgcagataattcagcaccagctttaaatttagctactttcttagcaggaatagtaatagttgcctttgtagaagggttaataccagttctttcagctctttcgcttactgagaaagtaccaaaacctacgagagatactttgtcaccagctttcatagcattagtaactgaagtgatgaaagcatcaagtgctttttttgcatcggctttgctcatttgagcttcagcagccattgcgctaataagatcagacttattcataatacgtaaaatgattaattaatatatatgttacacaaaagattatcccacaatggattgattccacaaatatagccgaacaaaacaacatatcaaataaaaacataaaaaaaacgcagcaaattattgaaaaagagctaataggaagcgtttttcatgctttaaaacagaatttattcgtacttttgcgtctattatctaaatattcagaaattaaaatgatgccaactgtaactaaaaacctgataattatcaatgtactagtatttttcgggacaatcgtagcccaacgttacggcctggatttaacgaattatctgggattacattttttccttgcaagtgactttaatccggcacagcttatcacttatatgtttatgcacggcggattcagccacattttctttaatatgtttgccgtttttatgttcggaccgattctcgaacaaacctggggacccaaacgtttcctcttttactatattctctgcggtatcggtgcgggacttatccaggaaggagtgcagtatattcaatatgtaacggagcttagccaacatacgcacattaacctaataggctatggcgttgtccccatagaagagtatctgaacatgatgaccaccgtaggtgcttcgggagccgtttacgccatattgctggcattcggtatgttatttcccaataaccggttgtttatcttcccgctgccatttcctatcaaagcgaagttcttcgttataggatacgccgcgattgaattatggtcaggacttgccaatagcgccggagacaatgtcgctcactttgctcacctgggaggaatgttatttggattgatcctgattttgtattggagaaaaaaaagcaataacaatgggacatattatagctgatttaaaggagacattcagaagaggaaatattttcatccaactgatttatatcaacgtaggcatctttgtgattggcacgttgattaacgttttcttgcgactgtttgaagtaagtacccccgatatattcggtatatttgccctgccggcatcctttatcggatttattcatcagccgtggtcgttatttacttatatgtttatgcatgccggtatcctgcatattttattcaatatgctctggctgtattggttcggaagtttgtttctctactttttctcggccaaacatttaagaggactatatgtattaggaggtatctgtggaggtttactgtatatggttgcctacaatgtatttcctttattcagttcgcaagtgacgggtgcaacattggtaggagcatcagcttccgtattagccatcgtagccgctacggcttatcgtgaaccagattacagggtgcaactttttcttttcggtgctatccgtctcaaatatctggcactggttgttatcggaatcgatgtattatccatcacctcaagtaatgccggaggacatatcgcccacctgggcggtgctcttgcaggactttggtttgccgccagcctaagtaaaggaactgatttgacttcctggatcaactggattctggatggtttcacttccttgtttcaaaagaaaacatggaaacggaaaccgaaaatgaaggtacactatggaaacagtgccaccggtcgcgagaaggattatgattacaatgcccacaaaaaagcacagtctgatgaagtggaccgtattttggaaaaactaaagaaatccggttacgacagtctgacaactgaagaaaagaaaagcttgttcgacgcaagcaaaagataaaagaatggaacatattggcaaatttgtcgcatatctgatacttgctgtcaacgctctcttcgtgggaacgttgatattaagcgcttatagcccttaccttaacccgaaaataaacccacttgcttccagcttgggacttgcatttccgatattcctgacgattaatctgatttttatcggcttctgggcatttgtcaattaccgctatgcgctcttgcctgccatcggttttctaatttgtattccgcagatacggacttatattccttttaactccaccacaaaaaacataccggaaggaagcatcaaaatcctatcctacaacgtaatgagtttcaacaatttggagaagaaagatggaaaaaacccggtattgtcttatcttgtagatagtaacgccgatattatctgtctgcaagaatataacaccgctaccaacaagaaatacctgacggaacaggacattaaaaaagcattgaaagcctatccttaccaatccgtccaccaacaagggaaaggagacgtgcaacttgcctgtttctctaagttccccatactctcgatacatcccatcgaatatgaaagtaattataacggctccatgaaatatgtactgaatgtgaataacgacactcttacattaatcaacaaccacctggaatccaacaagctcaccaaagaagacagagggatgtatgaggatatgattaaagacccgaatgccaagaaagtaaaaaccggacttaggcaattaataagaaaactggcggaagcatcggctatccgggctacacaagcagattctgtggctaaaaccattgcagaaagtaaatatccgacaaccatagtatgcggcgatttcaacgacggttctatctcatatacccatcgcatcctgactcaaaaactagatgatgcattcacacagtccggtaaaggattaggtatttcctacaatcagaacaagttctatttccgcatagacaatatcttgatcagccccaacctgaaagcctacaattgcacggtagaccggtctatcaaggcatcagaccattacccgatctggtgctatatcagtaaacgataagaactgaaaactctaataaaaaacacttatgatgattaaaaagacactaaccattttagcagtaagttgtatgatgtactcctgtgctacgaaaacagaaagcaatcctttctttacagagtttcaaaccgagtatggtgttccttctttcgacaagattaaattagagcactatgaacctgcctttctaaaaggtatagaagaacagaatcaaaatatcgaagccatcatcgaaagcccggaaattccgacattcgaaaatacgattgtggctttggataacagcgcacccatcttagaccgggtaagcatcattttcttcaatatgacagatgcggaaactactgattcgctgaccgcactttccatcaaactggcaccggttctttcggaacataatgacaatatctccctgaatgggaaactattcaaacgggtgaacgatgtctaccaaaagaaagattcattgaacctgacgtcggaacaagaacgtctgctggacaagacttataaaagatttatccgttccggagcgaaccttggcgaaaaggaccaaactcgcctccgcgaaatcaacaaggagctttctacacttggcatcactttcagcaacaatgtgctgaatgagaataatgccttccaacttttcgttgacaaggaagaagatctggcaggattgcctgaatggttccgccaaagtgcggccgaagaagcgaaagcagccggacaaccgggaaaatggttgttcaccctgcacaatgccagccgtctgcctttcctgcaatattctgaaaatcgcccgctccgggagcaaatatacaaagcttatatcaaccgcggcaacaacaacgacggaaacgataacaaggaaaacatccgcaagatcgtttctctccgcctggaaaaagcgaacttattaggtttcgactgttatgcaaacttcgtcctggatgaaaccatggcaaagaacgccaacaacgtaatgagccttttaaataacctctggagctacgcactgccaaaagcaaaagcagaagctaccgaacttcagaaattaatggataaggaaggaaaaggagaaaaactagaagcatgggactggtggtattataccgaaaaactacggaaagaaaaatacaacctgtctgaagaggatacaaaaccttacttcaaactggagaatgtacgcgatggcgctttcgccgtagccaacaaattatatggcatcaccctaagcaaactggaaggcataccaacttatcaccctgatgtagaagtctttgaagtgaaagacgcagacggttcccagctcggtatcttctatgtagactatttcccacgtcccgggaaaagcggtggtgcatggatgagcaactatcgtgagcaacacggaacaacccgtccgttggtatgcaacgtttgcagctttaccaagccggtaggcgacaccccctctttattgaccatggatgaagtggaaaccctgtttcacgaatttggtcacgctctgcacggactgctgacaaaatgtgaatacaaaggaacatcgggaaccaacgtggtacgtgactttgtagaacttccttctcaaatcaacgaacattgggcgactgaacccgaagtgctgaaaatgtatgccaaacattatcagacaggagaagtgatacccgacgaaatcatcgagaagatactgcaacagaaaactttcaaccagggcttcatgaccaccgaattactggctgccgccatcctcgacatgaacctgcacacgatgacagatgtaaagaatttggacatgcttgcattcgaaaaagaagcgatgaacaagcttaacttgattcccgaaatagcaccgcgttatcgcgtgacttacttcaatcatatcattggcggatacgcagccggatactatagttacctatgggccaacgtattggacaatgatgctttcgaagctttcaaagaacatggtatttttgataaaaacaccgccgacctgttccgccataacgtattggagaagggagacagcgaagacccgatggtgctttataagaatttccgtggagcggaaccaagcctggaaccactactgaaaaacagaggaatgaaataattcagcaaaaaagcccttaaacatcaaatatttgagggcttattacacatgaatgtgaaaaaaaaactatatttgcagccttgtatgcggcaaaaagaacttgtgtacgacagaatttaactgaaaattaaattaaaaaagtaatcatcataaattaaaagtaaaatgcaaaacaaaggatttgtaaaggtttttgcggtattactcacactggtatgtgtgttctatctctccttctccttcgtaacacgccattataccaacaaggcgaaagaaattgcgaacggcgacccgaaagtggaacaagactacctcgactctctctccaatgagaaagtgtggttgggtaactggacgctgaaacaatgtcgtgagatggagattagtttaggtttggacctaaaaggtggtatgaacgttatccttgaagtttctgtacctgatgttatcaaagcactggctgacaacaagccggatgaagctttcaacaatgcattggcagaagctgcaaaacaggctgtaaacagtcaggatgatatcatcacgctatttgtcagagaataccacaaagctgctcctaacgcaaaactttccgaactcttcgcaacacaacagttgaaagacaaagttaaccagaaatcatcggatgcagaagttgaaaaagtattgagagcagaagtaaaagctgctgttgaaaactcatataacgtacttcgtacacgtatcgaccgtttcggtgttgttcagccgaatatccagagcctggaagacaaaatgggtcgtatcatggtggaattgccgggtatcaaagagccggaacgtgtgagaaaacttctccaaggttctgctaacctggaattctgggaaacttatacagctaaagaagttcttcctgctatgcaatctgctgatgctaaattgcgcgctgtattagcgcaggagacaggtgcagactctaccgctgtagattccaccaaagaagctccgcttgcagaagctactccggccaagaaaagcgtaagtgctgccgacagtcttgctgctgccctgaaaggagatgctacaactactgaagataattcaacagctaacctggcagaaattaaaaagcaataccctctgttggctatcctgcagttgaactctagcggacaaggtcctgtgatcggttacgctaactacaaagacactgctgatatcaacaaatatctggctatgccggaagttaaagcagaactcccgaaagaccttcgtttgaaatggggtgtttctccttctgaatttgacaagaaaggacagacgttcgaattatatgctatcaagtctaccgaacgcaacggtaaagctccgttggaaggtgatgtagtaacagacgcgaaagatgaattcgaccaatacagcaaaccggctgtcagcatgacaatgaactctgacggtgcacgtcgttgggcacagctgaccaaacagaacatcggtcgttctatcgctatcgttcttgacaactatgtatattctgcaccaaacgtaaactctgaaatcacaggtggacgttcacagattacaggtcatttcactcctgaacaggcaaaggacttagcaaacgtattgaaatcaggtaagatgccggctccggctcacatcgtacaggaagacatcgttggtccgtcattgggtcaggaatctatcaatgcaggtgtattctcattcgtagtggctctgattctgttgatgatctatatgtgtatgatgtacggcttcataccgggtatgattgccaatggtgcattgttcctgaacttcttcttcgtattaggtgtcctctcctccttccaggcagcattgacaatgtccggtattgccggtatggtgttgtcactaggtatggcagtggatgcgaacgtacttatctacgaacgtactaaagaagaacttcgtgccggtaaaggtgtgaagaaagcacttgctgacggttattccaacgcattctccgctatcttcgactcgaacctgacatccatcatcacaggtgtcattctgtttaacttcggtaccggtccgatccgtggttttgctacgacattgattatcggtattctagtatccttcttcaccgctgtgttcatgacccgtatagtttacgaacacttcatgaacaaggacaaactattgaaccttacattcacaacccctgtttcaagaaacttgatgaccaacacacgttttgattttatgggaacaaacaaaaaatcccttatcatcactgtagccatcatcctcgtttgtatcggttcatttgccatgcgcggtttaagccagagtatcgactttaccggtggacgtaacttcaaggtacagttcgagaatccggtagaacccgaacagattcgtgaattgatctccagcaagttcggtgatgctaacgttagtgttatcgctatcggtacagataagaaaactgtacgtatcagcaccaactaccgtattgaagatgcaggaaacgatgttgactctcaaatcgaagcatatttatatgagactttgaaacctgtgctgactcaaaacatcactctagctacctttatcgaccgtgacaatcacactggtggtagtattgtaagttctcaaaaagtgggtccgagtatcgcagacgatatcaaaacaggtgccatctattccgtagtactggctttgatcgctatcggtctgtatatcttaatccgtttccgtaacatcgcatatagtattggctctatcgtagctctatcatgcgataccatcatgattatcggtgcttactcattgttatggggtatcgttccattctcactggaaattgaccaaacgtttatcggtgctatcctgacagctatcggttactctatcaatgacaaggtggtaatcttcgaccgtgtacgtgagttcttcggcctgtatccgaaacgtgacaaacgtcagttgttcaatgattcattgaatactacacttgcacgtactatcaatacatcattaagtacattgatcgtattgctgtgtatcttcatccttggcggtgattcaatccgcagctttgcattcgcaatgatcttgggtgttgttatcggtacattgtcatcactgttcattgcatctccgattgcatacaacatgatgaagaacaaaaaagtcgtaccagtaactacggaagaataataaattccaaaaatagaaaaagcctcttccgaacattcggtagaggctttttctattgattattaaaacaaatagaagctataagacgttcatcttaaaagaagccattgttaaactcaaaaccagatacgatatgaaagcaaaacaaaacaacttctcacagattcttcgtagtagccccgaggggaatcgaacccctatctaaagtttaggaaacttctattctatccgttgaactacaaggccgcttcaaatttgcttgcaaagataacggtttctgtcgatttaacaagaataaaaatacaggttcctttcagatatttcaaatatttggcgtcaataggacaataaagttcgatttattttgataattcgattaactttccgacctttgcgctcacaaattgaaagtaaaatcagtttttaaattaaatatagtaattaaagttatggcagacgaaatgatggttaaagaattggaggaagtagtagtacgtttctccggcgactccggcgacggtatgcagctggccggcaacatcttctcgaacgtgtcggctacggtaggaaatgacatctgtacattccctgactatccggcagacatccgcgccccgcaaggttcactgaccggtgtttccggttttcaggtccacatcggtgccggacaggtttacactcccggagaccgttgccacgtgttggtggctatgaatccttccgcactgaaaacacaaatcaaattctgtaaaccgcaaggacttatcattaccgactccgactcattcgaagccagagatttggaaaaggcacaattcaagaccgacaatccttttgaagaattaggcataaaacaggaagtacttgaagttcccatctcttccatgtgcaaagagagcctgaaagactccggactagacaataaatcagcactccgttgtaagaacatgttcgcactcggactggtttgctggctgttcaaccgtaaccttgccgctgctgaaaaaatgctgcgtgagaaattcgccaagaagcccgaaattgcagaagctaatattaaggtattaaacgatggtttcaactatggtgccaacacacatgcttctgtctctacttataagattgaaagtaaagctccgaaatcaaaaggactttatacagatatcaacggaaataaagcaactgcttatggcttgattgctgctgccgagaaagcaggtctggaactctacttgggttcttatcctatcactccggccactgatattctgcacgaattagctaaacataaatcactgggagtaaaaaccgtacagtgcgaagatgaaatcgcgggttgtgcttctgccgttggtgccgcttttgccggtgctttggctgtaacgactacttccggacccggtgtttgtttgaagagtgaggccatgaaccttgctgtaattggcgaacttccattagtgattgtaaatgtgcaacgtggcggtccgtcaacaggtttgcctactaaatcagaacagacagacttattgcaagctctttacggacgtaatggtgaaagcccgatgccggtgattgccgcaacttcaccaacgaactgttttgatgccgcatacatggcatgtaagattgctctggaacacatgactccggttgtattactgacggatgctttcgtagccaacggctcggcagcttggaaacttcctaacttaaatgaatatcctgccatcaatcctccatacgtgactccggacatggctggtaactggactccataccaacgcaatgaagaaaccggtgcacgttactgggcaattccgggaactgaaggattcatgcaccgcatcggtggtcttgaaaagagcaatgaaacaggtgcgatctctaccgaaccagaaaaccataataagatggttcatctccgccaaactaaagtagataaaattgcagactatatccccgaactcgaagtactgggtgatgaagatgcagatttactgattgttggctggggcggcacgtatgggcatctccgtctggctatggactttatgcgcgatcatggaaagaaagtggctttcgcacacttccaatacatcaacccgttgccgaagaatacagccgatgtattgcgtaaatacaagaagatcgtagtagctgaacagaatttgggacaattcgcaggttatttacggatgaagatacccggattgaacatcagccagttcaaccaagtgaaaggacagcctttcgttacgagagaattgatagatgcattcactaaattattggaggaataaaagatgagcgataaagtatataccgtacaagattataaatcaggccaacctcgctggtgtccgggatgcggtgaccacgctttcctgaactcactgcacaaagctatggccgaactgggagtagctccgcacaatattgccgtcatttccggtatcggttgttcttcccgcctgccttactacgtaaatacgtatgggttccacactattcacggacgtgccgctgctgttgcaacaggagcaaaagtagccaatccaaatttgactatctggcagatttccggtgacggtgacggtttggcaatcggtggtaatcacttcatccatgccgttcgccgcaacattgacttgaacatgattctgttgaacaaccgtatctatggtttgacaaagggacaatattcaccgacttcagaacgtggattcgtcagcaaatcatctccttacggaacagtggaagacccgttccatccggcagagctggctttcggtgcccgcggacgtttcttcgcacgttgtattgcagtagatggtgccgcttccgtagaagtgttgaaagcagcagctaatcacaaaggtgcttctgttgtagaagttctgcaaaactgcgtgatcttcaacgatggaactcatgcttctgtagccaccaaagaaggacgtgccaagaacgctatctatctggaacatggcaaacccatgttgttcggtgaaaacaaggaattcggattgatgcaggaaggtttcggactgaaagtggtgaaacttggtgagaatggtatcacagaaaaggatattcttattcacgatgctcactgccaagataatacgcttcaattgaaactggcgttaatggaaggtcctgatttcccgattgcactcggtgtgatccgcgatgtagatgctccaacttacaatgatgctgtaattggacagattgaagaaatcaaaggcaagaagaaatatcataatttccaggaattgctaatgactaatgatacttgggaagtgaagtaattcaccacttcaatccataaaataataaaggcgtagacaagagaatcaactctctttctacgcctttcattctttctatcgtgtaacctatatttatatcaacctattcgagagcagtgccacccactttttccggccaatacggattctgataaataacagaattatctgtactattatcaggagacgcaagtctcatttcattaatagcaaccggactcaaatagttggctttagcccaagaatatccatcatatacctgattattgattctcaccttgctaaaaggacgaatatacttgaatgctctggaggaaatattagaagtagcatcatccggatcatcttttaaagtaacgtcttccggaagttcataagttttataagcctcttcccaaaagttatacccttcaggaataaacttattagtaagtacgccatcccaagctctccaacgcaccaggtcatcccaacgcattccttcgccaataaactcgcaacgacgttcgcgacggatattatataaggtagcatccacttcatacgaaccgggatgagcggccaaatccgtctccttattcatatcggtattgtcaatggttgtctggaaattgcctgtaatgcctgcccgattgcgtactgcatcccaatagcttttcgctttaccgtctaccttattattacgcaaatagtaggcttccagataattcagataagcttcaacaccacgaaagataatgcaccctgtagtcgattgcgactgaccggaaataatctgcttattattatatgtcaagcatttccgaatccgatacccggtattatcagatgtttgggcttccaatgatataatattaggttgtttgaattctttaagtgcaggttcttctgtcgaactggatggaagcaaatccttctcgcccaaaacaaacatttgcagacgcagatcacgattctctttcacatccatgatagttttgtcacctttatattcatctcctgctgcataatagggaagtccgtctttcatgacaaaacagtctacaaagctcttcagcataccattattacctccagtaaaaatataagccggtgtgccatgcgtgattgacacgccaccaccattcatatattgcttccagaaaagaacttcggaataactactcatatcttcttccgcaaacatctcgaaatatggattccagccaacaatccccggtatgtttttcggattggtcagaccggtattattggtcaaagtaatatcatcagccacctgttccgctgctttcatagcctcatccagaaagaaattgatttcattatccatgttcgtggagaaatcggtatgtattctcttacccggccaggttgcatcccccggcacacgccctgttcccttatgatacttttcaaacgtagcctcatacaaagcaacgcgcgactttatcaataacgcgcaattctttgttaatcgcgttttgtttcctgaaatatcatccaccatatatttggcggcggaatcgagctgattgatgataaaacgagcaacgagattacgcggctgacgaacagatttctctgtcaaaacagactgattatccggcaatacttcggttataattggaaaatctccgaatgatttcagtttactgtaataaatccatgcacggataaagtacatttcgccgacatagtgaagaatctgttcacaattgccctcaatcttgcctgcctcgaatttaggaagcacattttcgaagaaataattgcaatagcgaatttgagtaaaatcccagccacctccagtattaggaacacgccactgacctttctcaaaataggtggaagaatatcctccggctaccatattatctgtattctggtcattgttcactgtaccgactccatatccaccatgcgttgaaaagatgttgttgtactgcgaaatactatatgcaaccaagtggtccgtcgtattaaaatactcttgcggagtcacctgatccagaggcgccatatccagaaaatcattacaagatgtaagcgaccacgtagctcctgccatcaagattgtttgtaatgtaatatgtttcagtttcataagccttaaaattagaagttaacatttaaacctaccgagatggtgcgctgcaacggatagagtttaccattattcgcatcataagtgctttccaaagcctccgggtcgaaaatcttggacatatgagagaatgtcaacagattgtcacctgacacgtatactcgaactgaagacattccggctttatttgtccattgcttgggcaatgtatagcctatctgaacattcttaatacggcagtaagctgcattctgaatatagcggctctgcactgccatgtttctcgaatcacttttcaatacgcgtggataataggcatttgtattagcacccaacgggtcaccctccggacgccagaagtcccaatgttccttaaatccggtagcctgccattcgtccactccattggctccccagaaataggggccgctcaacacataatcgcgcttggccactccttgcagaaatatgcggaaatcgacacctttccatgctgcatccaacgtgataccatatttaaatcgaggtgtattattgcccaaaatcacacggtcaccgggtttctctgtggtattttcacctgtcgagatcactccatcgccgtctacatccttatacatgatatcacctgctccccacttgcttcccaaagaagactgatccactttggccaagtgagcgtccatctcttcctgtgattgtgcgatacctaccgtttcatatccccagatttctcctttcatcattcccggataatatgcttcggaaagtttgttgttttcattcggatagcgagtgattttctgttggtcatcggctaacgtaaatttagcaccataagagaaatcaccaatcatatctctccaccccagttccagctcaaaaccataggatttcatatcggaattgttgattttcggaggagtagcacccagtacggaagacaattccggagccgggccaatcatatcatacgtccaacgcacaaagtagtcgaacgaaccggtcaagcgattattaaacagcccccagtccaaaccgatatcccaggtttcaatcgtttcccaagtcttcaagctggagacgataccgggtaggcttgcataattcggtctttttccattcaccaaccagttataatcagtgccttgtggcatcgtctgatagaaaggataccatgcatccttagtatccgtattacccaactgcccccatgaacctcttaatttcaatacatcaatatgagctttatcggctatattcctgaagaaatcttcacgtgctatattccatccgactgacaatgacgggaaaaatccccaactcttgtcattaatgaaacgggacgaaccgtcataacgaccgttcaactctatcagatagcgttctttataattatagttgatacgcccgaagaatccggctaccccattgtgtgcatatccaccggaagtagtaggagattccgttgctgtattcagtgtaggcacagaattggagatcagcgtattcttctgccccgacaaacttcttgtcttatacaactccgcattaaaacctgccatcactttaaagtaatgaccgctttcatattgtttaaaataatcggaatagatattcgtgctgtaataattctctttataattatattcgttcacaacggaactgccggctccataacttccccatggtatagaatacggattaccgtcaccgtcatgagagaagataggtaatacttcccaatgttcatttttgttttccgttcttagagcaccctcgatattaattgtccagttcttgaccggttcaaacacaaactgcaactgttgagtattcaagtctttctggttggtttgtcggccaccatcctccaattctgtaatttccacaccattcatgggatagccattaggatcgtaagccggacaggtgggccagcggcgagcgatattatggaagaatagcccggtcagataagagggtcggtcaaagtcctcacgtgtccatttggtagaatagttcactctgaaccaatctgtgatctgcgctgtaatggtgctgttcattgtataacgttgcaaattatcttcaccatgccgcaacagaccgttctggtccataaaactaccgctcaatgaaaattggattttctcattacctcccgaaatacttagattatgttcttgagatggcacccagtcattgtagaattctttaaaccaatccgtattggcattcgctccgccataattgttccaacggttattattcgtattcagtgttgtgacggatgttatctttccctcctgataatcttttattttctgtaactgctcggatgagaacggagcctcaccggatctgcccgcattctctgcggcacgattaaagtactgtgcaaaagtatatgagtccatcatttcaggcactgataccgcgtcgctgaaacggacatttccattataactgactctggctttacccgctttccctttcttggtctgaatcagaataacaccaaaagcagcacgcgctccataaatagaggcagaagcagcgtctttcaaaacagaaaccgtttctatatcattcggattcaacgaattaagattaccttcgataccgtcaatcaacacaagtggagacgacccggaaccatcaccgattgttcctgcaccacgaatattaaaactcatcgaaccatccaaggctccaccttcacttcctaccgtgaagttcaagcctggcactgtaccctgtagggcctgcgccacattggttacaggacgtgcagccaacactttcgcatcgaccatacctaccgcaccggttacatttacttttttttgtggtccgtagcctacaacgactacttcgtcgagctgttccgaatcttctttcataacgatattaaggggtgtcccatcagctttcacggtaatagttttataaccaataaacgaaagtgagagaactgctcctttgggggaatcgatagagaagcgtccgttgagatcagtaacagtacctgtggcagtaccttgcacctttacagagactccaataagaggttctccgttttcatccactacaacacctgtagtctttactttttgctgctgtatatcagcagtttcctatgtttcattagtattagctactgcttgcataggttgtgtgcaccataacaataaagtagcaactgctgctattttcaggcaacgtgttccccgtccttccataaaggccgggcatcggttagtttttcttgtcatactttaatttattcagttagacattagtaagttagaatttctaaggttttatggtgccttcatatattatttgacaccatgtttcaggcaatttgtgtgtttagttttccataggcttttctatttttatcttaggttaatacttgccagagttcttaacgaacttggttttacctatgcttggaaacacaacttggaaggacattttagataaaacagtcatccatacactcgcaccgctttgagtttgagacgatttgtatgtaaattgctatataataaatacttattttgataccaaaggcaagttgataaaactgttatcccattttgttgccagaaaacacaacaatccagctatcccgttttaaaatattttagtagatttacttgcgtaatatttcattttattctacttttgcttcaccataatgatattctaaacgattcttttgttgttattaagaattaaaaataataaggcattcgttttcatatcaaaataaaaccaagttcgttaagaactcggttttcatttctctccttctctaatcgatattgcaatatacactactcatttcctttgactaaataacacctatttatcaatatcattaactttatggatagagaactgatgataagaagctattttaacaggtacttatttataaataaaaaatggagaaggatggagaaaagggtagaaaactggaaccaggttcatagctataaactcaacactaaatttctgaaaacgaatatacaactattaagaagcatttagaaggttcacaggtttcaccttcagctgaacagctatgagtcaacggtttacagtgacataaagcacaaaatacagaagaaagtatccttcacctccttcaccatgtagagtctttcatatagattaaggacatatatatccaatatacagggcatatatgcgcaacgtgttggatatatatgtccaacacgttgcgtatatatactctacaattcaggtattaatatcctagagatagagtattagtgtctgattacttaggtgctaatttccggttgacggcagttttattttgttttaaacctgcaaacagtttgtttcaagcgtatgaaacaaatagtttcccgccttgaaacagattgtttaccggcatgaacaagacatttgatgcatggattctacaaattactacatagtcttctataaatatgccaagattcttacacacgagacagcgtgtgagataaaggtatcttacacacatctgcaaccgtatcttgcactgcataaaacaattgtatatcagctaattgaatccgattagtgtaaggtgcaagatgtttttgcattttcaaactttatagagtcgattaagttttaattatttatttgtcagttcactattcagtaattataattcaatcgcagcctttaaaggtaattgattggaagccggaccgacaagaatctcaaatacccccttttctactacaaagcggtgttgattcatatcgtaataagaaaatgcgtcttcattcaatacaatagaaaggcgttgtgtctctcctttcttcaagaacaccttatcatagcctttcagttctttcaaaggacggggaacggaagattctacatcatgcacatatacctgggctatttccgaagcatccatttttcctgtattctttatatcaaagctaaccgtcacctgatgttcaccggttttctccacagctaaattactataagcgaaagtagaataagacaacccatagccaaatggataaaaaggttctttacccgaacggtcatatccccgatagccaacaaaaacaccctctgaataatcgacacgtttaatttccgctttcagattctcataatagctgtcatgcaccggattatcttcccatttcttttcgatagaaatcggcaacttaccactcggagaaatctttccagtcaatatttcggctattgcctgtccaccctcctgtccgggataccatgccatcaaaatcgcttttgcagcctcatgccaagaggtaaagtcaactccaccgccagcatttaacactactaccagattcggatgcagagaagctactttctgaatgaataattcctgataatgtaacagagcaaacgggcgatcgaacccctctccttctgtattgctattgaaaccagtacagaatacaacattatccacctttgccaatccttgacgaagtttctcttcattcagcctggatgctttaaaacggataattgctgaagagatattatcaaaaaactcgattcggaagctgtattctttacctgcctcaaccggcagttccacttcacggcttgaatatgaatgattaccccagtcgcctgtaatatgcttatcattcacaaacaggcgataaccatcatcgccaccaatggatagttttaataatccatccttttgagacatataactggctgtccaacggacagaaaatccatcttccggaaaaccttccagtggtgctccatattgccagtcataatcaactgatgcttctgtacgaatgacctccggttgtcccgaaagcgttttattcttaaaatattcggctttaaatcctttcgtctgccgagcggcatccgcgtaaaattcatgaagaatatcctcataaatcacatcgtccgtcaacagaacgaggttcttttttttcagtttttccagtccctcactaacagataccgtagaaaatggagttacaaaaccacttccaccacccgtaggaatgcggtcggcattgggccccatcacagcagtctttcctttcaaggggagtagatttccttcattcttcagtaagactacaccttcgcgtgccagttctaaagcagcctggcgggaaaaaggattatcctgcgcgatgttactgtctttctgttccttatccagcatgccgtaagcaatcaaggtctgcaagatatgctgcactttcagattgatggtttcttctgtcaccgtaccgtttttgatagcaggtataagattgtcgacattcataaaacgtcctttcggcatttcaagatcaagtccggcattagcggctcctacggcagaatatacggaagtccagtccgacattaagatacctttaaatccccagagattacgcaagatatcaatattcaaccatttatgttcggtagcatggacaccgttcagaagattatagctgttcattacagcacttacattcgcttcctgtacagctttccgaaaggtcggaaaataaatctcgtgcaaagtacgttcgtctatgtccgaactggcatgatgacggctccattcctgattattagctgcaaagtgcttgatggtggcaataactccttccgattgcacgcctaggatatattgtttagccgtttcacccgttaaataagggtcttcgccaaagtattcaaagttacgtccacacataggagcacggtagatatttactcccggtccgagcagtatattcactcctctggctttggcatcctgtcccaatccttgccccagttgataaagcagactccggttccaggtagaagcggaaagtattccggaaggatagagagtgctcttgggggcatgattacgaattccctgcggtccgtccgccagttttatttcaggaatccccagacgggggattgcacgaagcgagaagctggtatatccggagatatactctattttctcttgcaaagtcattttagatacaatttccctggcacgttgttcggcttggggagtgattgtctgcgcacaggttaatatgctccatgcaagcatacataaacctatgcctcctattttctttttcatggtgattttgtattaatatagcattgttaaaaaccaactagtctatcagttctattttaacggtctgtccctgtaccaaaatatgatattctccggcttcaaggaaccgtttaccatcctcattgacaaaaccgaaatcacgttccaggtctatgtcaaaacggaaagtcttcgtttctccggctctaatcaactgtttttcaaagtgtttcagttctttcaccgggcgggtaatcgagcaatacggatcggatataaaccaatgaacagtctctgctccatcgcgagcaccgacattagtgacagtcacttctacagacaatcgatcgccgcgcttcactttagtaacagaaggggtaacggtgccatacttaaattcggtataacttaatccatgcccgaacggatataacggatcgcttgttatatctttatagaatccttgatgtccacgtccgctcttgcggcgattgtaataaataggaatttgtcccgttgaataagggaatgtcatggcaagtttaccggatgggttgatacgtcctgataatataccggccatcggcaacgcgccattcacacccggttgccagatttccagtatagcatcggaaattagttccagacgattcaattccaacggacgtccattcaccaataccagtacgataggctttccggctttcttcagttctgcggccagttcttcctgaatctgcggtaatgcgatagaagaacgggaagcattctccccactccaggtcatcatctcacccaaacaaagaacaactacatcagaccagcgtgcagcttccaatgcttctgcaaatccttctttgttatctcctttcgtagcacagcctgctgcataacgcaattcagcttttcctgcaaattcagtagccagtccattatagagcatggcaacatccgtatcttttccatgaccacaccaggaacccaacaagtcccaaccattttttgccattggtcctatcacggcaatcttctttttatcagtcagcggtaatgttttgttttcatttttcagcaagaccatggattccgccgcaagccgggctgcaatatccatactttgcggacggaagaaacgttctttctcacttgttgcgggagtataaggacgttcgaacaggccgagacggaatttcaaaagtagaacacgacgtacagcttcatctacttgagctaccgatactctgccctcttctaccaactcctgcaaatggcggtcgtaagcatgagacatcatatccatttcaagaccggcagtaaacgcatgccaggctgcttcttttttggtcgctgccaatccctgatttttcaactgttcgatggctccccaatcggaaacaataaatccatcatgcccccaacgtttctttaatatctcggtcattatgtaaggattggccgaacccggcacaccgctgatatcattaaaggaactcatcagtgttgccgcacctgctttcacacccatctcgtaagggagcagataagtatcccaaagagtttgtttggatatctcggtatagacatagtcacgcccggcttcggatgccccgtaacctacataatgtttcagacaagctgccatacggttttctgctgacaagtcatctccttgataacctttgacggaagctgcaccgaataccccgtttgtataaggatcttcaccataaccctctgccacacgtccccagcggggatcacgagccacatcaatcatcggtgagaaagtccagtccactcccgacatacgcgcttcctgtgcagatacagcacacgcctgctctaccaaatccggattccaggaacaagcctgtgccaacgaaataggatacacggtacggaaaccatgaattgcatcgtagccgaaaataataggaatacccagacgagactcttccattgcttttttctgcatactattacgcagtgcgggatttgtttcgaagtaaatcagagaaccgatttctgcgggcactttcttcacttcttcacctacattattcacattgttattccgtcccagggtatattgattaagctgcatcactttctcttccaaagtcatgcgggataggagatcatttacgcgtttctctatcggagccttcggatctttatatagtgcaacatcttttttatcttttgccgaaagggtgcatatagaacctagcaaacataatccgtaaaccaatactttctttctcatcggtgttttcgtcggttaattagtatataaatatagctttatcagacagccacaacatggcttctttttatcgtctttcagataaatcagtcaccttatacggatgcttcactgctgcatgagcagctttctgggcaacagcttttcgagcctcatccaggctctccggggcataaggatttccgattacattgcgtttgaagatacgttcgaaccaagtgcaggcagcagtataacgtccgactttcacatccagatgatgtccgtcccggttcatatgatcgccaatgaaagaggtacgggcattctgtatggcagtgcccgtagggataatcatcttaatcttatatgccttacctgcttttttcactgcatctacaattgcgtgatacatcgtcagctgatcgcggttgtagtttttaaatccaccgtgattggaagtggatgcataggcccaagtctggtgcagcatcaactttgttttcttgggaagacgggcttttacatactctatgagctcgggaagagaggcttcatacgtctcatacattccggaaaaagtacttgcctgttgcaggctgacataatcccagtcttcatccgccaacaccatttccaaagacatcttgcctttttcccgtttctttccatccgtaccgattttccggtaggcataggcaggagcattttcacgtgcattcttcacatggcgttccagagaacagccaccaataaacatattgccgattatggttgaaatgccttcggcttccgcaagttcatgcagatattgctcaacggcatcttgggaaaagctgttgccaatggcaagtattctgaccgttttttgctgggcatatgctcctccggcaagaaggagcagtatgcacatacaaatcactatatttctatattgcttcattgtaatcaatatgataaaaaacaaaccttatttcgccaggctaatgcatagtgcattgatatgtccttccgcggcactaccggtatcaagccctttcacctcgacaatgacctttccctccgaatccggttctacattctcaaacttggcaatgtactcctcgaagtttgcggcagcaaacgaggcagcatccttgatacctgtcttcacttctttaaccgcactctccgttttacctaccaatttataagaagagatacgggcgtctttgcttccattgaaacggatggctaaaatagtgaaattatatttccgggctacatccagttgagagatttctattcttcctggacctacatcaccctggtttttctctcctttcactaacaaaccgtctttccatgcagtcagaggaaattccacgccatccaccgtcactgggctagccggttcggaaccgactccagcatgagtcgcagtaaatccgtcaagcactctgacaccaatattcgtataattgttttccacatcttttatccagctggtggttgaactttcctgatgagaagttatattattccacggagtggcagaaagtgaagtcggaccgaaatcaatatagatgggggctttcaagtcggtgtcagatatctccggttgcttgaagtcaaccaaatcggtcacttcatcaggtttctgcacagcgtaatgggcagcattttgtgcaatcttcactacctgcgggtcaatcgtttcgggagcatacgggttgccaacaacgttttgtcccgtaatcatctcaaaccaggtgcaggcagcagtatatcgcccgtaagtaacctccagatgataaccgtcacggttgaatgcatcacccaggaatgaggtgcggccgttctgtatggctgtccccgaaggaatcaacaggctcaaatccgtatgattcgtcatagcctgtcgtgcagccgttacgatagaagaatacatcgtcatctggttgctatcataatccgggaaactttcatgagtggaactggaagcgtatgcccaagtctgatgccacagcagtttagctttcggacaacgttcctttattcctgcaatcaaatcagccaataccgtatatgtttcgtatttaccggatttaccgctcgcctgttgcagactgatataatcccagttttcatccgccaatccctgtgatagtttataaccggttttacctactttctcgccttttactattttacgatattcataagcagcggcatccgactggaagttagcccaatgcttatccaggtcacagccgccaatatacatatttccgataattaactcatagcctgccgcttctgccagttcatacagatattgctcaacggcatcctgcgagaaactattgccaattgccagtattcgtatagcattttgctttacggtcaccggaattgtagcaactagcggttttgtatttgtaggacattcgatagaaatcgctgtgctaccatccgcaacacccgtaataataatgctattattatcttcgctgacagctactgtagcgatgtttgcatctttggaagtacaggtatattccggtttcagctcttcttcaccaccaaccgatacgttcagagtgacagattcaccagtcatgacagtgacttccttagaagcaaccaccatccagtttccatctacatatactattttttcttctgtctgggttacaatcttctccgagtccgagcaggaaaccaacgaactgccaacagaaaataacgttactaaaaagaataatccgctcaacagaaaattattctttattctgaaatgctttatcataagtacttttagttatttctttttttcatgtaataatctctcatcagataccatgccttcttgcgcattccctgatcggatattaaccctttgcggttccagccatcctgattagtggggtggaaacggaacggagaacggaagtcgaacagaatccagggagatactccacgcaggttagggatattgtcgaacatacggatattgtctctatacagacgtgcctgatactcttcactccaggagctgactacattctcatcgccggactgaccgtacagtgcttcaccaccaaattcagaaataatcaacggtttgtccgtcactacttcccagattgcatctttcggttcaacaggccatggatgataccagcccatatatttattgattgctacgacatccaattgggaagtaaaggaatcttccattacaaaacgctgtttctcactgttaaagcgcacaaggtcaaaagcggcgacatacagacgggtagtatccagttgtttgcctgtttcaagcagggaagtcaaaaaatcattccgttctttggaaggctgtgtttcattggcaacaccccagtaacctactgcacaacgattctgatcgcgctttatcatttcagaaagcatcttctgtgctttcttacgggtatctttgtctgtaaagtcaatgccttgccaaataggaatttcctgccagagaaggaaacccatcttttctgccaagcgtaccgtgtattcattctgcggataatgtgccagacgaatcatgttcacaccaagcgccttagcttcattcagcaacatagctgcatcggcttccgagaaagcacgtcccatgcgctgcggaatctcctcatggaaagagatgcaacacataaatgtcggtttcccgttcaggtaaatatccgttcctttcactgtgatgttacggaagcctatttgttcctccacgcggtcggtacttgaagaaatggccacaccatagagtttcggttcttcgggcgaccagcgttgcagtttctttgcattcaatacggtttccgcttttccttccgcatcagtggtaagttccgcattgattttaagttcggggatggcgactgtcaccttttcacctgcctttttatcagaaagacgtacacgggcaatgatccggtcgggagcatttttatccagttggatgaagtaatcttctataaatgtgcggggagttttcaccagcaacacatctcttgtgatgccgccataattccaccaatcgaacgccatagcaggaatggcgtccttggtacgacgattgttcacttctattgccaggaagttatcgccatctttcaacaggtccgtcacttctacttggaaaggggtgaagccaccttcatgttctgctatttcttttccgttcaggtagactttgcaacgatagctgacagcaccaaaataaagaaactgacgcttgtctgccagacgtttggcatcaaaatgacgcgcataccatacagtaccctcataatatttcagttcgggcgactgcgagttccagtctctcgggacattaagacgcaagccgccttcgaatgcatattcgtagaaatcagtatttcctttcggttgctgattttcatagattttcattcgttgtccctgatcgtacaggtcgataatggcattccatttaccattcagtgaatgaatgtcacgaccgtagacattcgttatcagttcttgtgccgcaacgcttcctgcaaaagcgatcagcaacaacagacatagatttaatttcttacctattttcatttatctattagtttgtggtatttatacattattcgtttctcgattcattcttcaggaaattcatcacccagttccaggcagcattccactgctctgcataggcataatgggcagtcgtttcggccacgaacaactctttcggagcattaatcatgttgtaagccgaataagtggtggtaggcggacagaccatatcattataaccgaaagtatagaatcccggtactttaacctgccgggcaaagttgactacatcaaagtactgaatggttttaatcttctccggtgtccggttcctttcatccttaaacatgtgcggccaacctcctgcgcgaccatgagcatagcctgcaatatcacacaaagccggatagaaagaaactaatcctttgacacggttatccagtccggcaatcactatggaaagtgctccgccctgacttccaccgaaagttgccagattaccattaaattcgggaagtgtgtaaatgaaatcaatggctcttacacagcctgtataaacccgtttataataatacttatcccgatcgtccgtattgaatgaatggtaattcttcaaggccccgttataaagtcggtgatatacatcccccgtcaggttgaccggaatgccgtgaataccgatctccaaaatgataaaaccatttccggcacgttcgggctccccgttatatgcgcggatacccgcacccggtactttcaagatggccggatattttccgggagctttcggcacacaaaggatgccatacatgcgggatgcatagtcattattcgcaaaagaaacatgatatacattcactttgtccgtacacttttccggcaataaagtcattataggttccagcgcccacttttcagcggcttctttggtgctcttccagaattcaagaaaatcggcgggcaacggagtagtcggttgtagcttctccggatcaaagccgacggtagctacaccttcatattcacgcccttgataactgacaaaagcacggcaacgcaggaaaccctcttttttcattgtacctgcattaatttcgagcttttcattcttcaaaggttgtttacctgtctgatgaggtttcatcatatcttccgaaatctcataacgcacttccagatgatcctgtggaatattgcatttcagtacagctactttgaatttcactttttctcccggttgatacaaccaattggtgtggtcgggagtgaccagcacttgaatcagcctttccgccggttgcccgtacacaacgaattgcacggcaacaaacaaagcaagaaaaacagaacgcaaactttttatcataattccattattgtttatagtcttttcatggttttacctggtattgataaagagtgaaagaattcttatcattcaactcgaaacttactttaccctgtacaccgacttcagcaacaaactttttgccatttcccatcaaaggagtaaaagttaccttcttgccctccggaagccaagtatcaatggttcttttggctatatcattgtcttcgcggtaaataatgagataaccttgcgtgtcagagactattgattgaaatcctgtccacgagcgtcccgaaggttcttcaccaatgggtaatatgatgccttgatgaaattgaagttgcaagggttgatattccttgagcagagttgccgtagcataagcctcttcgggcaggttcgaagcctccatccaagccaatggctgtgccgccagggtgatggcaaagaggtagtcgaaactataacgagcgggagcaaatggatcggtagtgctgtacttatcggcattacgccatttattaaggaattctatctgcatcttctcggccggtacatagcgagacagcatccaaagattacgcaaggtgcgatagggataatagttgccccaatcggtataacggttttccaggaagatattgccatactcattcatataatgatatccaccgcgacgaccggcagtggcatcgaggttgaaaatcacctcatggttggtttgtgctaacacggcatcaaacaaccggcgcaaattctgttcggctgttttagtaggtatttgtaagccatctatcttgaaacagcagatgccatactccttgtaaagcccgataatgacttgcgcgtctttttgccaatcggcaaaatcattctgtatactaggattgaaccataatccgatacgaatacccaatttctttcctttctctacaatgcgtttcagtccatgagggaatttcgtggggttgggcgtccagtaatcggcatttttccaaatatctttaaagctgcctccggctgtctttgagttgggactttttccgctctgccaaccatcgtccagttgaaagagggtgacacccagacgtgcggcacgatccagctcagccagacagaaagcctcatctattttggcatcctgactacggtcaccccaggtattgagcataatcatctcatcctgtgcggcagtgtggtggcgcagttgtttttgataaaggcgcaatgctgttagtgcttcttgttcatctccggtatagacaccggtaacgcatccataaacacgagtccagctatccggtttcacatcatcagatgcaatgcccagacccactaccataaaatcgctaaagtcggccacgaagtcggaaccattataatgtaattgggtactgctgcaaggagcctctttcaagaaaaagaaaccttgccgggtagccacatcgtgagcaaaaagcagattaccacgataggtattgcgacggtaaggaagccaggtacgttctgtcaccagattgtcgttccaatcagtatagtcgaagaactctaccgtacgggcacgccaatgattaccggagagttgcaatctgtcaatcgtcggagttttcacccccgtagtcatatcggctgtgtgctctatatttttacgatcggcattagaacgattgtcatctttattctggtaaagttctacttgtcctttcagataggtatcgcaggcaatggcgggacagtctgcataaatgcgatagcgacgttctatacttagagaaccgatggtgcaagccacagtggcttgcagatagctggcatgtataccattcgttggaatctcattcacagtgaaagtagcagctgtagagatgcctttcacaatcgagaagtcgggctctttgccttgagccgggattatttttccacatagcttatcggtgaggctaatggtgacaggtgtaccattattccacagcatggtacgctccatgtagttattgcccatacgtagtgtatcacctttcaggaaagcataatagtgttgtcctccccaaagcggcaatcccaatatggttgagagaaatatcgtgataatactttttttactcatagtttgtctgcggtttgatgtaagccggagcctccaacaatttgttgggttcgttgaaacgttggttatcgggtacattgtgtttgcccaagcctgcctgcataagctgctttaattcgggcagatgatgatgatagatatcacgcggttctacgccatgcttatgacagagtccggctgccatacctactacttcgcccatcataccagtagtacgcatcacacgcaccgtacccaaggctacgtgtgtgcaactcatattacgacctgccataaagaggttatccacattgcgcgaataaagacaacgataagggacagcataaggatgaatccaacgatgcaccgttgccgacttgaattcattatcaggaaaacgcacactgttcacgctatcggggaagtggaggtcgatactccaagtggtagtaaacgaagcatcctcgtgcgccacatttttgtctatatcgtcttgtgctaacacatagtcgcccagaaggcggcgagattcacgtttaccggaaacatacgccacccaatcgagtgaacggttggcatactttttacgatccgcatagtgattcttcagatagctccaattggaatataccaccaaaagtccatagtcgcgtatgcgttcagcctcggtgatttgattacggttcattcctgtttcccatttccattcgcccatagttacaggctcgcaattatcagcgccaaagcgcataccatattcgaagcgggggaaagaggtcttcttcttcatgtccttgctataccattgtaccgatgcgcccatcactagcgagtcgggctgctcgggagcgagactttcgccatattcatcgcggccttcacgtcccatagtccaatcggcaccggctaagtagcctatggtagcatcgccagtgcagtcactaaaaagaggagcggtaagttccgtttgttcacctgtctcaatgtgttgaatagtgactgatgctatgcgatcaccctgcatctttacggccacagcacgttgcgaagcataaagggtgatattcttttcggcagctataaagtcttcctttttctgatcttcataatagtcacccggttgggcattaccggaacgttcatgaccgaattcgcgtatcatacgacctaacccctcgttgggtcccttttcgataataccacccaggtgtacacgtatctccgacgagttattaccacccagtacaggacgatcgttcactaatgccaccctacaacctaaccgggcagcagccgtagcggcacacatgccggctacgcctcctcccactaccacaaagtcgtactgatgggtgggcaccgtttgttgttgttgcaagcgggcacgaagtgcagctgtctctgcctcgccccatgcagtgggttgcgcattcatatcagtcgtgagatagatggcatcacaacgaccattaaaacctgtaaggtctttcaaagcaagggtaatagtacctgccttcaatacgaccttaccggcggactgccattgccaggaattaccggtgtgtcccaacgtagttttcagtaacttaccacctaaagccagacgaaactttccgggtccttcggcatcggtccaaggtgaagtccagttgtaggtgcgggcatatacatagtaagtgcccgcctggggaatattgatttctgccgtagcatcggccacaggaatacccatgccatgtgccatgagatagggtgaacccatttgatccatgaactgctggtcgagcacccagccgcctcgctggctgaagctttctgcttcgatgagcagttctccggctacagccacaaggctacaggctacggctatgcatgtcagtaagatttttttcatcatagcacagcgttttttaattattgaatagttatatcacccactttcacccaacctttggaggtttgatactcatcgcgggctgaaattaagataccaatggcattctctttggtagtatctaccaatcctactgcccaaatgtaattccctgcggctacatcagtgagtttgatattagtagtgtaagtcttgggagctcccttcatccaagtggcaatgtttgctttgtcttctatatagatgcggacgggctcctctgtattcttatcgagcagagcgatagcaagtttgtacttgtcaccatactgcggcaaattggtaggacagtaaccccaacccaagttcgaccagcggtgagtaagtgatacactactgccactacgagctatagtaggaatagacagacggtcgggatagagacggtaaccaccttcggcaataaactccttcaccaaatggaaagctgtattgaaccaagaatgagtttcacctttgttcacgttggtatcaaagcggaggtccatcatgttgacataaccacccttggcttcatcatattctccctggcgcacctcggcaaaattcttgtaaccatcgccggcaatagaaccaccgtgtgatgattctacccaaccaccttccatagtaataggtacgataccatgataggtagtactgatgccacgctcccaatccttataatattgcttcatgccgaaagcatcgtgacgcaaacagaagcctttagctacggcacgtttcaccatatcggcagctacatcggtatcggtatcactaaactctttgccactaagcaaacagcgatgataattaatcatgataggcactttagtgaaaaggcgtgacattacgtctgtaatccattcaaatactgcttgtctaggagcttcatcacctgtagagtatttcagggtgtgagtctcgccccatttgcctaatccaaaaccactcacaaattgagtgacatcaggatcattgtatttggctgcaaaagcagtaagaaactcttcatactccctctggaaaatgggatcgtccggataaggtgtccatacgtttacactaccggtagtagtggtaaatccttcagcaccggcctcttttacataatcgggacaggcatcttcatgtttgtcacgactatcacacacaaaggtaaaggcgagcttcaagtttcgttctttagctccttccaccagcatacgaaaacgcttggcaggttcggtctgtacactttcatcccatacatatttgcctttttcaggattaaagttactccaaagaccacgtacgtagagcgtattgccatagtcagataccttcacagtaccttctgacgactcgaagttatcataaagatcccagaaatccatcatcataccacttccaatacccgcgtaaatgacccatccactcatagggttacgctgcagttggtagcgttcgggcatgatattgacggtcgtgttgccttcaatgttccaactataatcggttataggggcatcatcgtctgaacaagcagtgccaatgaaagacgtagtagccagcagacacatcgacaaggtcttgatgctgttttttattattttgttcataaaatatatctcgtttattgttatcatttaaaggtagaataagaagtgaagtgataaaagctccacctcttattctttcattttggatttatttaatatcaaagagtacagtgttgttctccaggtccactaccacatagttacagccctccgggatgaggaaataagcatagcggttattgccctgacctgttacggctccttctatcttacccgctgttactgtggtgtatccattgtagctattacgaacagcatcagcagtagaaccaacgaaccatccgttattagcatatcgcagcgtgctgaagttcacccaaccggcatttgtcttcccataattatccttatattcattacgtggcaatacatcacctttataaacgaatactttcggattggcaacactctgaataagattatacttcacttgacagtacttgaagctttttccggtttcttcatcaatacccgaatcgtaagcaaaactattgaaaccaccatacatgtgcagtacattgacttcctgactccatgggtttttccccagttcggtattgttgaacgatacggtgagtggtttcagatcggtagcggtcgaatagatggtaatagatttctcctccttattcaatacaatgcggtaagttccatcggccggaattgtccaatattgtttatccactttgctaatgagtacttgtccgaatgttgacaattgaccatcttcgatgtcatgactatcagctatttccggtacaatggccatcgcttgttcaccttcgaaggtgagcgggatgtaaaggttaccagctttcagtgcaccacgccaagcataaatctggtcattttcgaggacttgagccatctcaatctgttccccacctacggcactaccagccaggaatatctgatcggcttcaactacagcaccagcttctactatcttcaccgtctgtttactcatattcacagtgatacgataggtagctgcagatggaattaaccacgaattggcttcagcgcgatcggatatgacgcctgccatttcacctgtggtgataggggcatcggcggtttccgggccaatggcattcaattcgtcggcatagtcaacggggaagtttatcttaccggcaaccaaagctccttcgtaactataaattctgtttgtctcgtctttcaacgtcatcttaatattatcatcgcctacggcagtacctcccacataaaggttatcagctttatactgtttggggccataagttttgaacttcaccgttgcagtagcaatatcgggcaccataagacggggaccttcaaagttggctgtaacagtaaaaaggacttcgccaatggtactggtggttagaccgaagtaatcgaccaatatatcctgcatctctttgttggtgtacgagcgaagaaattcaccatcatcatcaaattccttgatatttgcaacatcgctaccgataagctgcatctcatatttataagttgtgatataatcttcaccaaaattgtgagcggtgctccacttcagcgtaaaagctgtctcgttgggtttactttcatcgagcttaatatattcgcccgaaggagtcaactcaatctccgactggttgcgtgaggcagtattgtctatctcctcttcgcacgaggtggcaagcatgctcatcattcccacagccaccattccaaggtttctatataaatgcattgttttcatgttcgtaatagtttataggattaataacccggattgttgggtaacaagttgggacacaactccacatcatgtgtaggcagcggccacaaatattcgcgttcggggaagatgcgtttagcaccctgcgaacaataaccggcattaaagagagctgcaaagtctgctaaaccatcttcgtcgatttgcggagtcattccccagaaccagaggttcttgttcacgatattgttcagcaattctgtggggtcaataagcatgatgtaattgtaaccattcaatgcttttcctgccaatttccaacgcatcaagtcttgcaggcgttggttctccatagcaaactccatgcggcgctctatacgcagggcacgtcgcagttcggtttggttggtagtggtcacggcaggataactatcagtagctgttacattcacaccataagcacgagcacgtaccatattaatggctttcagcacgctgtcgtcaatcaggttctgttctatcatggcttcagcataaatcaacagtacgtcagcatagcgcattatgatatagtcttgttctaccttttggtctactgtccacgtagcatcaatacctttcttccacaacaatcctgtatatgaactatattgattcacgatacgggtatcttggttgctttgtgtcttacctgtggtatagttcattacagttttagctgcaggactggggtcgtattcgaaaccacagtgctcggtattgaattcaacgatggtcattgtacaacgcgggtcacggttcttgaaaggcttgcgaggatcaaacaacggtgattcgtcaataggtagcccgtcagtacagagatatgaggccaagaggtcccatgagggattgtatgagccatatcctccggcattacgaggaagaccgttcttcacaatccaggaatcgagcatcacttcgttttcaatggagcgaggtatcacgaacactttctcgtcattcagtttggtgctctgcttgaaaagtttagcatagtcaggttccaaagaatagagtttaagatccatacaagctttggcggcttgtgcagctatctcataatcacccatatagagggcaaagcgcgctttcatagccagggctgctcctttggtaggatggatattttcgtcttttccatagctttcaggcaaaccggcaatggctttatcgaaatcagcatacaccaaaggaatcacttccgctttaggtctgcgaccacgttgcaaagcttcggaaatggttatagtctcttcctgatagggcacatcaccataaaagaagatcagttcagcatatttgcaggcacgacagaaataagcctcaccggcataacgattataaacttcctcggtcacagcaccctttgccttgtgaatattttcgagcattgtgttggtgcgggcaataagtttgaatgattgctgccacaaagcatatacttcatactgctggccgttcagggttccatcaagcacggttccaccacttcccgggttacggttcgtctgacgataggttgtgttgtccgaccattgttcggatgagctaagaggttcttgccaataacctaaaatatagaaatcattggaagccaaacgcaattctgtttcggatgtgtaccaagactcggtattaccttgcgatttgggtaccaagtccatgctctcgcaagcagcaagactcaggcacattccggctaataatatctttgttttcatattctattcctatttatttaaaagttaacttgtatgcccattactaaagaggtggtaataggataatccgatgtacccatttcaggatcccaaccactagggaaattgctcaaacagaagaggtcactaccactcacatagaagcgggcacggtttataccggctttttgtgtccaactcttaggcagggtatagcctaatgtgatattcttcaaacggaagtatgaaccgttgaacatccagaagttagaggtagcatagttattgctcttcgacacattcgaaaggcggggatacttggctgctaaattctcttcagtagtattgaaaggactccaatatttaccctcgagaatggctggtacgttaccatagttatcacgcaaaggttgtaccatagaagtagagaggtaagaattttgcttgccgatgccttggaaagcaagactgaagtcaatgcctttgtacgaagcgttaaggctaccaccatactggaaacgaggcagtgagttacccaaaggtacacggtcgtattcgggactgattacgccatcgggtacaccatcgggaccactgatgtcacgatacttcaagtcaccaactgtaacggtagtactagtgcgagccgagttgttcacttcttcttgagtttgatagatgccctcgcacacataaccatagaattcattgaagagcacgccggcacgtttaatcttaccaccactgatttgctcaccatcattcatataatcaatctttgaaaggaagtcggagaaattcacatttacaccatacttaaaatctcctatctggtcgttccatgccacttcaatatcataaccatgagtggacatcttacctgcattcgtactagggttgttatatcccataaaataagggatttcgatattcagcaacatgtccttggtctctttccaatagtaatcgaaatgaaactgcagacggttgttcaaaaagttgacatccagacctaagtcagtactggtagtcgtttcccaagtaatatcttctacagccaacacagcaggacgagcagttttatcagaaactacacttccatcagccatatagaaaagtgaattaccaaaactcatcaaagcaatgtaggggaagtagttgctgccgatacgttcgttacctaacataccccatgaaccacgcaacttcaagaatgaaagccaatcccatttgaggttcttcatgaacttctcttcactcgctacccaaccagctgaaaatgaagggaaagtaccccaacgataacctttggcaaaacgtgaactaccatcgtgacgcacgttagcctggaacaggtaacgatcggcatacgaataaataacacggccaaaaacagagtttgaagtatactctgaacctgtaccgctattggtttggaaatcttccgaaccgatattgaggtaaggataaccggtcagttcatatttatcgcgcgcagcaccgagactttcgctcttcatatagtagttttcgaaaccggccattactgtgagattatgactgccaaaggttcccatatagttggcaattgcctggctagtgacattataatcatcgttacgagtttctgtgagcgaattggtagtccaagtgctcccggagtcgaaataaccgccaaaggtttcgggatcatcgggcaaggtgtatccacatgaatttttaaacgctttcttcttttgatagttgataaaaggagatacgatacccgagatgcttagccccttgataggcttgaaggttagcgaacctttacctgccacctgcgtactgtgagctaccgaattaccaccggctacaagcaatccataaggatttgcaccactcttacccgaagctaaacgaccatcatcccaggttgcggggtaaatggcgggcattttacgcatggtatcaaaagggtcatagtttgtggcagtactcttagcatgacggatatttacgtctatttgagcactaagtttatcattgatattaaagtcgttgttcgaacggaacatgtagcgttggaaaccacgaccgtcataaagaccgtctacttcgtcatacgaaagggtagctaccgactttaccgctttgttaccgcctgatacagagagagtatgagtcatacggggagcacttgacttcaaaatcagatcagtccaatcggtaatggggtagttgttcggatcagtagcattatacttcacccaattcttggttttgtcagccgtatattcttggaaaaaaccaccagtagggttatcgttgtatttcaactcgttgctcatctccaagtagcgagtgactcccaccatactaggttgtttagtaggaatttcccaaccaaattcagcattatatttcagattgattttaccggtatcgttaccgcgcttggtagtaactaagataacaccagcagcagctttcgaaccatagatactggcagccgcagcatctttcaatacagatatgctctctacatcattagaattcacatagtcgagcgaactctgcacaccgtctacaatcactaacgggctcgattcacccatagtggtaataccacgcacacgaatagaggcggctcctgcaccgggagcagagctattacgcgtcaccatcacaccagagagtgatccttgcaatgcattggaaagcatggctgtacgcttgttcaccagctcttctcccttcacggctgccaccgcaccggtaaggtctttcttctttaccacaccgtaaccgataacaactacttcgttgagcgctctgctagcttcttccattactatggcatacatatttttgctatctatccgcacgattttatccacaaagcccacatagctaatgagcaattcgctaccctcgggaacgtctatctgaaacttaccatcaaggtcggtgatagtagctgcatcactacctttcacacgaaccgtagcaccaatcatcggaagatcagttgcatcgactacctgaccagagatgcgcttcgcctttttcacttgagtagtagcctttttagaaggattagcagtgatggttacttgacggttctgaatggtatatttcaaatcggctagccgacatacttccgtcaaaatagcatcgatcgactttcctttcaactcgatgttcactttgttgttgagacgatcttttacaggttgatcatagacaaaaacatattggctatgtttttcaatgtagtcgaacacttgtttcactgtcgaatcttcggctttaaggatatacatcccatttaccttttcgaacgaaacagtcgacgcactagaataagcgggcacagacagtagtccagccaaacagaaagcttttgccaagcttaccaccgtagttgtgattgtttttcgattcataatataagattaataattaatatttattgcataacgatttatgagtaatctaccagttaattgttgattttaagtttaccgactttgcaccatccctcaaatagaagattcttgtcgaccgccattttcaagcccggctggcatgctttggttgtatcaaccaaaccaataagccaagtgtagtttcccttttgaagtccatccaatttgacagttgtggtataatgaccatcacgcccttgtacccaagttgagagatcagcctcatctgcaagctgttttttcacaatgttatgattgtcatccatcaaagcgatgcagactttatattttcctttccattgaggaatattggtaggacagtatccccaacccagattgcgccaattgtgttgcacgctcacacgctcgcctgaacgggctttatttacaaaactgacctctgtgggatagagccggtatcctccctcacgttcgaaacgcttcaccaaatcgaaagagcgattaaaccacgaggctacttcatcaccaatgcgaagatccatcatattgacatgggcattacggctttcttcgtactcgccccagcgcacatcttccgaatgcccctggcgatacttgccactaggatcaatccagtaacggtggtgcgctccggtaatccatcctccctccataatgatgggcaagcgaaagcggtaagcacgggcaaaatctttttcccactgttcgtagtaaccagtcatgccaaaagcgtcgtgacgaatggtgtatcctttggcaatggctctttcgagcaatcttttactatcagggtgtggttctgcccagctgatggtatctcccaccaaacgatggtagtttatcaccaatggtacacgtttgaaagcttttgcataggtatcggtaatccattcgaatacttctactttatttgagtagttattatacttcacgccatgtgcttctccccatttaccaagcccataagcatcaataaaatctactttatcgggatcgtcaaaagcaacagcaaaggcttgaagaaacttttcgtatttctgttgaaacacggcatcgtcaggataaggcgaccatatttggggattattaggatcttgaaaacctttcgcaccggcttcctttacataaagaggtgtgttctgtccttggtcgcggctgtctacattgatacggaaagccagtcgcataccacgttcacgcaccgaagcaagcaatttatagatacgtgagtccggatcgttccatacataatctccctctttactctcaagcatattccaattgatgcgaatgtaacatgtaccggcgtaatcgctcacgcgaacagtggaatccccaccatttacgggcatagcatcataatggtgagtttgccaaaagttttcatcccatacacgtcccaaatacatcacccaacctgtaaggggatttttgagtacagaggtagtatcaggctcaaaacatactgtttgttcgggcgcttttagtcctttagttatagatatttgtgtatgtgccgaagaccatccacagagtatcagagctgctataaaaagcataaatgtgcgtaacaaagtgtatcttttcatatttttcactggtattaataaagcatagcttctccttacgagaaggcgtataagtttcctctaccttgctatgaaggcattataaattggttaataataagtttctatgtaattattttattcaggaataatcaataacaaatataattactccttcactaagtagatcgtatcaccatgaattttcattcgggtttgcgtcatggtttcaatggctttcaatacatcctttacctgatcgtcaagtactagtttgccataaagtttattagccgacatcttatcatcaaacagaatagtcactccgtaataatgactgagccgttgggctacagactctacactttcaccggcaaggtttatcatcccttgcatccagcaagtatattcatcggtattcactaaccgtttctcagcaaaaccaccctcctgcaaatttaccagttcattcggtttcatgcgaaccctgtcattgttggacgttttgagttctaccgaaccttgtaccaacacaacctgcgaatccgaagcatcgtaattgttcacattaaatttagttccaagcaccttcactctaaaattatcagaattaactaaaaaaggatgctccgcatcgtgtgccacatcaaagtaggcttcacctttcacgtatacctcacgatactcgccattaaaacgtttgggatagcggacaacggtacgcgaattggctatgattctggtaccatctgccaacatcaacgtcatcttttcgccaacaggcacttcgacctcttcatcgtaaacatcagccatcatttccataacttccgcacggtacaaaccgtccgttgtattctccccgattatatatttaatacctattaaaagaagcagcgtcgcagccaccgagccaacatacatcataatgcgtctctgcctagatttacgctcttgttggtgcattttcaaaaaagctcttttcttaatggcggagatatctatctcagccggagtgctatgttgtatgaacgacttcaacttgatgtcgtccagcaaatcaccatatttataatcatttatatctttatccatcttcaattctttttatcctttcaatttctttttcctgcaaacaatcttttcacctaaaacttctttctatttataaagacgcagaggttgaatttatctataggtttaatttccactttttttctttcagtgctgtttttttctgaatcacccgcctacaagtctctttcgcaaagcattcatagcataccctatatggtagttcactgtaggaagtgaaatttgcaacatacgcgcaatttccgcataaggcatttgttccagttttgccaggaagaatacatgcttgcacttgggcggcaaactattgattgcttcattcaaacactgtatctcttcacgcgaaagcatatcatccatcggagtctgcatatcagggaaagagaaattctgaagttcctcaaaagagatctcctgattactcttcacctctttacgcaaataagagattgatttacgataaacaatcgtattcaaccaactcgacatactggcaatttccaaaagcgtactacgtagtttccacacttcaaagaaaacatcgcctaccacttcttccgccatttccttattactaaggataccaaaagcgtgatagtataacctcttcgaatatcggttcataaaactgttaaaagccagttcatcccctttggaaatcaacaaaagttctctttccaggtcttccatttaattagattactattttatatattgacaggcgcagaattcttatgtattatataggtcaagtctcataatattaactttctttatcaattagcctattttcccccaacaatgagaaaagctatatcatcactcggaaaacggagtttgatatagctcttccacacttaacagctaccatctggaccttacagaacgagctttttagttttgctacagttcttctccataaagacacaaattatcttgccattttatagatttcattgcccgccatcaagaaagcgccgactccataaacttccgtcatatcacgagtcactttcttcggatcagcaccgatttgctgcacatagcctagtttcccatccggttccactgccgataacaatgccttccatccctttatcatcacaggaagataagtcaccttatccaacaacccttcgttaataccataggctatggaataaactataaaagtagtgcaactggtttccggtgacggataagaagcagggtctaacagacttgcgtgccagaagccatcaggatgctgcaatccggcaatccgtgtagccagtttcacaaacagttcctcatagaatttgcggttcttgtcttttcgaggtaactctttcaatatttcaaccagaccaccaagcacccaaccattaccacgaccccaaaagactttcttgccattagcttcacgcttatcaaaatagcgccagtcacggtagaataaattttcttccttatcgaacaagtaatcataagtcgctttatactcacggttcataaacttgatgtatttcttgtctccggtcagcatatacagtttggcatatacagggggagccatgaagagggcgtcacaccaagtccaccgttccaaagttttcaagtcaccttccactaatttgaaactgcctttagaaggatgattgataatccattccgtacgagccaatgttggtacaatcatctcttcatccttatatttgcgatataaatccaaaaaggattgtgacacggcaatatcatcagcatgataaaaccgtttgtccggctgccagcaattccggcgacctatacgggtcaaccatttatagtaagtatcatcaccgtcttctttctctgccaattcagcccaatcgaccataccgacatagagagcaccttgcggccagttcaggtcgtcatgttcaggagccggatgtggattggcaatttgccaatccgcaacctttctcatgatagacttaacttcggacttttggaaagggatttctaccgctctcacgaaaacactgcataaaaggtatgcgcttaacaagaatatctttctcatattatcaattctttactttcagtctatcaattccaatttcacctttttatccttcacttgtacataataagtacctttttccaaaaagcgtttaccgtctccatcaataaagcccaagtcacgtaataaatccacttcaaatctgaaagttctggtttcaccggccctaatcgtttgcttctcaaaatatttcaattcttttaccggacgggtaatcgttgaataagggtctgtaatgaaccaatagacagtttccgcaccatccctgtcgcctgtgttggtcaccgcaacttctactgacagtttatctcccctttttagttgagtagcagatgccttgaggtcgccatactcaaaagtagtgtagctcaatccatgtccgaactcatagagcggttctatcgtcaggtcttgatacttgccctgatgaggacgggcactctgccgccgattataatagatgggaatctgtccggttgcatacggaaaagtaatgggcaacttgccggaaggattgattcttcctgtcaaaatgcccgcaagcggtttgcctccggcaatgcccggttgccagatttcaacaatggcgtcacaaaccggctccagacggcaaagttccaacggacgtccgttggagagaatcagcacaatcggtttgccggtcttcttcagttccatcgctaatttctcctgtatcttcggcaaggcaatggaagcacgcgaagcattctccccgctccagttccgcttttcacctagacaaagcaggatgacatccgccttcccggccgtagcgacagcttcggcaaagcccgattcatccttaccgtcaaagtcgcatcctttggcatacagcagttgtgacaagtctttcagttccagtttcagcccgtcataaattcctaccacatcaccgtccttgccgtgagcagtccaggagcctaacaagttccagcgatttttacctaacggacctatgaccgccacctttgtatccgccgccaatggcaaacgtttctccttgttctttaacagcacaaaagactcttccgccaatttctctgctatttttatatcttccggctgcaagaagcgctccttttctgtcgtctctcttatgtaaggattctcaaacaagcccaggcggaacttcaaacgaaggatgcggcgaacggcatcgtccacaatctccaccggcaccttgccctcccctactagttctttcaggtatttgtcatatccgcgggacatcatgtccatatccacgcctgccatgattgctttttcgctggcttccttcaggtcttccgccgctccctgggaaatcaactgtacaatggaaccccaatccgaaactacaaatccgtcatgactccaacgacctttcaatacctctctcatcgtataatgattggcagaggcgggtacaccgcttatatcatgaaagccactcatcagggtaacggcacccgccttcactcccatttcatagggaagcatataggtatcccaaagagtctgcggagagatttccgtatatacgtagtcacgtcccgcttccgaagctccataaccgatataatgtttcaggcaagcggcaatatgctccccgtccgccaaattattaccttgatatcctttcactgaagcgacagcaaaaactccgttcgtatacgggtcttccccatatccttcggaaacgcgcccccagcgaggatcgcgtgccacatcaatcatcggcgagaacgtccagtccagtcctgccagacgcgcttccctggcagccatggcgcaagctttctccaccaaagccggattccacgaacaagcctgcgcaatggaaatcgggtaaacagtacggaatccgtgaatcacatcgtgcccgaacagtacaggtatccccaaccgcgactcttccatagctttcttctgtatgttgttacgcaggtggggactagtgctataataaagaagcgcaccgatttccgcagggatattcttcacctcctcaccaatattgttcgcgttcgtattccgtcccgcaacatactggctcagttgaagcactttctcttccattgtcatgcgcaagagtaaatcctccacacgcttctccgtcggagctttcgcgtctttatatacggcaggcttctcattcctcgcctcaagcatgcaaaacgccgtccaaaggcacaccccacacgctatcaacctttttttcatcatggtttctttcatttaattaaatatagctttatctgacaggcgcatggtgcgcttgccgttacttttcagttcaaaaacggtcagggaatttgctcccttttgcaatgtttctgctggaagttgtatagattgctgcgcattctgttcccagtaagagcccgcataatgtccgttcacccatacttctcccattccccaaccggagacatccagataagtatcagcggggatttctactgtaaaagtccctttatagaaacaagggcgaccaccgtccgtttgtggtgcgaaagtcagttcaccgactgcacaatcgcgtaccgccaaaggaatcattctccaattccctatttccgtatccgacaaggtgatactgccaaaaagccctttggaattatccaatatctccggcccataggtgatacggccgatattttccgcatataattgcaaggtgtgcttgcctgcaagcacctgtaaggggattgctttcttctcttccgtcatccatccctgtaactttccatctacatatacggcggcatagtctcttacattttccaccgtcaataccgggttctcctcctctgccgtgattgtggcctcataaagggcgtatccgaactcaagtcccaactcattcatcggcagcaattcctctgcctcctgcacttctccgtaaatttgctccaaagaagccgtctccgacatctgtatttcctgtgccgatacagatgtcagaaacaaaagacttagaataaaactaaaacttctcattctttccctattttcttaagaacgattctataaacgacgcttctacatctacttgcgggttgaagcggtcactcttcacatagcggtcgatactaaccagcagttgttgagtggcaggccgtttctccatttctttctttgtatccagtgccaacaccatcagcttcccatttcctattctggcttcaaaaccgattcccagtttgtggttagtttcataactgtctatcacctgaatgaacggacgcaactgacgtggcgcctcatccatttcgattactttggcatgcgttaagatgtcccaccattgccagtcaaggtgtttttccgtaatgaaatcgtcgaacatcgccttgtctgtatgaatcagacaacccagtgtcatcggtttccatttgaacatgataggattccagaaatgattatggaaattggaactacgccctataaccttagccggcatggggcataggacaactttccttccttctttaaggaattgtttagccctgtcgtcaaataccgtcgtatagagaacatccgccgtagactgcatcagttctttcagttcccgacgaggatatacccaaatatcccagctattattgattgtattattcaccgataaatgaacagtcagcttttgaggagcggtgataccgttaagtgcataactaaattctcctgcggaaaaaacaccatgattaccgatattttgtgtttttagctttccacttttcagcaccttgccgtccgcatctgtcacccaccacttaaacttagcgtttttcagggcagagggactataattatagatttccgcttttcctgtgaatacgtcgtcgttatagtacgaacgtttcgaaaaacgcagcagagccacagtcggagcacagaattcccggaacttctccggtgtaatcagtcctttagagttccagaaaggatcgaggataccgacaggcgcatatccttgccccgtaaagtcattaatagacaaaagctggaaaccggatttcagataagtacgcagttgagcttcaatcacgtctttatattcgagtacggtttgcgcaccggaaacctgatagaaatcatctgcctgatccaacatgccatgtgctttcaaggaatcacgatacacttcaaaattgcgtgcttgtacagggccggtaaagttaggaatctccttaaaattaggatagatacagcgttgtcccgattcatgggaaatgacaggtacgtcaatacccaactctttgtttttatcccagtcggtagatggtcgtccttcataaatagccatgtgacctttggtagtctggtgagtgatatagaattggtcggacttgacacgggtacgggccgtcgaaccgctgtacagtctgcggctgtcagtggtacgtccataatgagtaagttcttcgataaaatcaaaattaccggtaatctcattaccattgcaatagagaacaaaggaaggatgattgccatactctttcagaatggctttctgctcgcgacggaagaaattataacgggcttcgtccggttcagcatcttttccccacatcggcatttccacttcaagatatactcccaatttatcagccacccgaaatgcagccgcaggcggacaccaagaatgaaaacgcatgtgattcattccatagtctttcaggatagtcagcacacgttcccaagacgcatcatccaccggcgcatagcctgttttagggaagacagcgttctctactgttccacgtaagtgtatccggttaccattgagatagattttatccttatccgccgttatctcacgcattccgaaagtagtagaacggctatgttgatagtttgcattgtcagcacggatagtcaggtcacattgcaatgtataaagattgggagtaaattcatcccacaaccggacattctttcctaatgcgataacatcttctacataaaagacagaatcatttccactgacggttatctctttattcaaatcatacgaattgcctgatattgtaaaagccgcttttccggtaaccggtttatgagtatgattcagtattttcattttcacttttaccgaacggcctgacacatccggatataactgcatatcatcaatgtacacagggtctacagccattaacttcatttcacccaatatgccattccagttgatttgcgtaaattcggaatgagcatgatcccatttgtgggtatcatactgataacgattgtcaatacatacggtaataacgtgtgtcttacccggtttcacaaaatctgtcagttcatgattatgaggaacactgacataatcaatcttactaacctctttcgtatccacataaatggaacttagccaatgtgtccgttcaaaatacacgaagatacgtttccctttccactccttcggaatagcaatctcacgttgataccaagccggccccatgtattcatatacacgggtcagacggtcaatatgccgatacggagatttgtaacctatcttgtaatcatccgtaatggccggcaggacaatcgattcttgcaaacgatgtatataacgcacatctaacgaaccacgccggaaatccatcacatccgtctgaaatccccacttaccggataaatctatttcctgcgtctgcgctttcaaaggtgataattgggttatcagcgcaaatgcaacaaaaactaactttataaacttgttcttcatataaatatctattagtgatcttacttcaaatgtttatcggcaaacttcacaaactgcgtccagtcatacagattaatatcatgttttcccgaacggatatgataacctatagtgcctgacaatacaggctgattaacagccggcatttcttttaccggcaatcccggcagcccgaacaactcataaacaggagaggcatatacaccggaaagaaattcccctttcgggtcagcccagcggtcttcttccgcactggcaatatagaccggacggggagccatcagagcaatcaattcatgctggtcgacaggaagagtgtcttctttatcattgtattgccagaaattccggcaaaaccaatgtgtaaactgacagttcacagcccgtacagtctctccgaactttctccgcgacaatgccgcaccaccacaaccggaatcattagaaataaccaaagcaaaacgtgggtctatcgcaccggcccataaagtcgtttttccgagacgtgaatgtccgaagatggctatacgtttggcgtcaatgtctttatccgtttcaaaataatccatcgcacaactcattccccatgcccaggcagccagagttccccactcatcttcagcaggccgtgtctgtccctttttgtagtacaacggatgaactccgttctgaaaaccatcatcaaaatccggatcaatgtccccacggtagaaagtggccagtccatatccatgttccatcaacatctctaccggccatctggaagctgcactaccccggggaaacatacgttttctgccataagcaatcattctctcttctgacgggaaagtgatgccctcatccgggtgaatggcatgattacctttgaaatttattccgaaaaacatgggaacagtcccttttcgccgattaggcagatacataagtactgtcagataatgcttctcatcttttgtgagataaacggctacttccttacgggtagccaaaccgcccaaagcttctctatcttcgttcagtagccggaaatgcaagtccttcgagcgaactggagctttaccatatatttgagtttcgaacaggcggagcagttccggacgccgcttttccacccattcttttttagtcgtcacttttctgccattagtcagggtcaggacatcaggaagcgtatagacaggcaccttactctcatcataatttacttttgtgataacttgttccagttccgcaagttctgatgtagacttggagcgaagccctgtttcatgggccgatttctgttgggctttcatttctcctccaagaaatgaaagcccaaaaagcaaacatacaaaccgaaagctattttgtctcatggatatttaagattacatcctaattaatttctactcaccaaactttgttttataatactccctcatcaagtaccacgcctttttgcgtattccctgatccgagactaatcccttacgatttcagccatcctgattggtcggatgaaaacggaacggagaacggaaatcaaataaaatccatggagataccccccgaagattcggtatattgtcgaacatacggatattgtctctgtaaagccgggcttggtattcttcactccaggagcttgctacattttcatctcccgactgcccgtataatgcctcaccgccaaactccgatataatcagcggtttatccggtattacttcccataccgcattttccggctcgatgggccacggatgataccaacccatgtatttgttgaccgctacaacatccagttgtgaggtaaatgaatcttccatcacaaaacgtttcttctcacgattaaaacgtaccaaatcgaaagcagccacatacaaacgggtcgtatccaattgtttgcctgtttccagcaaagaggtaagaaattcattccgtgctttggaaggctgcgtttcattggcaattccccaatatccgactgcacagcgattctggtcacgctttatcatttcagacaacatcctttgcgctttcttacgggtattgttgttcgtaaagtcaataccctgccagacaggtatctcctgccaaaggataaagcccatcttttctgccagtcgcaccgtatattcgttttgcggataatgtgccagccgaatcatatttacgccaagcgcttttgcctcattcagcagcatcgccgcatctgcttccgagaaagcacgccccatgcgctgagggatttcttcatgaaaggaaatgctgcacataaatgtcggcttgccattcagataaatatccgttcctttcaccgtgatattgcggaagccgatttgttcttctacacgatcattggctgaggaaacgattacttcataaagtttaggattctccgacgaccaacgttctaacttctttatattgaataccgtttcagcctttccttcggcatcagtcagcatatcaatgcttgttttcagttcagggatagaaaccgtaatcttctcacctgcctttttgtccgagagagcgactttggcaatcatccggttgggagattccttatccagttggatgaaatagtcttccagataagtttgtggggtagtgaccaataatacatcacgtgtgataccgccataattccaccagtcaaatgacatggcaggtatggcatctttggtacgacggttgtttacttcaatggcaataaaattttctccctcattcagcaagtccgtcacttctatctggaagggagtaaatcctccttcatgacttccgatctctgccccattcaaataaacacggcaacgatagctgacagctccgaaataaaggaactgacgtttatgtgtcaaacgctttgcatcaaaatgacgtgcataccatactgtgccttcatagtatttaagctccggcgtttgtgaattccagtcaccaggaacattcagccgcaatcctccttgaaaagaatattcatagaaatcagtgtttcctttaggactttgatttctatataccttcattccccgaccttggtcatacaagtcaatgatagcattccatttgccgtttaaagaacggatatcccgaccatatacattagttatcaggttttgagctactgcattccctacaaaaaggataaacagcaacatacacacgattgtcttttttctgatttgcattaaattatctatttataagattaatattcttaactatcaacgatttacgctcacgttactgagtatatatatccagcatggtgagtatatatatccagcgtggtgtatctatatacccaccacgctgtatatatatggcctgtaaacaggataattatcttatttcatagcgatatagcataaagtcattcttctcaggtagagagacttttattgttccttttctgccgacagtcgttgccatcagtttcccattccccagtatcggcgtacacataacttctgcaccttcgggcaaccatgtttccacccatgtctcctcccgtgcattatcttccctgtaaataaggagataaccgttttttgaatgacaaagagactgaaatccagtccacgagcgccccgaaggctcttcaccaatcggtaaaatagttccttgatggaaatcatactgcactttcttatacttctccattaagtctctaatgccaaatgcttcttccggcaagttggaagcctcaaaccatgccaatggttgccccgccatagtggtcgcaaacaaatattcaaaagaatatcggtgcggggcaaacggatcatctccatatttctccgtatttctccatttattcagaaactcgatttgtaatttctctgccggaacatatttggacagcatccacaggttgcgaagcgtccagtacggatagtaattctgccaatccgtataacggttctctaaaaagatgtttccatattcgttgaacatatgataacctccccgccgactggctgtcgcatccaaattgaacatgactttattatccgtttccgccaatactttatcaaacaagttccggagattaatctccgctttcttggtaggaatagtcaatccgtcaatcttaaaaatacggataccatattcacgatacaatcctatcagtgtttcggcatctttctcccagtcgacaaaatcattctgcacactcggattaaaccacaaaccaatttcaatgcccagtttctttcctttctttactatcggagccaatccgcggggatatttgacaggatccggtttccaatagtccttattgtcccagatattcttaaaagaacctttagctaccgctgagttcgggctcttgcccacctgccatccatcatctatttgaaaatgagtgattcccagttttgcggcacgttccaactcttgcaggcaaaatgcctcattgacttttgtgtcctgactacggtcgccccaagtgttcatcataaccatttcatcacgattccggaaatgacgacgaatattcttctggtaactgcggagcgctgtcagtgcctgcaattcaccatcgccatatacccctgtgacgcaactatatgttcttgtccatgtatcttcctgaatattcttttcagtaattcccagtcctgtaatcatgaattttccgaattctgcgatgaaatcagcacctttataggctaactggacactggaacaaggggattctttcagaaagaaaaagccggtgccttcttccccgtttcgaacaaagagcaaattcccccgataactgtttttacgataggctataacatccctctctgccaacaaattgttgttccaatctgtcacatcccaaaattcaacagccttggcatgccaatgctgccctttaagatataattgatccaaaatagccgtaacggatttggatttcatgtcttcaacgaactcgatgtttttccggtcagccgcattttcttcccgtccgccaaaaacgctgttaacactccctttcagataagtgtcacatgctatggccggacaaccgtcatatatacgataaatccgttgtatatccaatgttcccaaagagaatgtaactatcgtcttcaagtaggccggatgaatatcagtcgcagccaccttttctacccgacaagctcctttggaagcttcccgggtatctttggagataaagaagtccggtgcctgctttaccgtgaaagttgttttccggtttgccttatcgctcagactataagtgacaagattaccgtcattccaaatgaattttcgttcaatacactcatttccaatcactaatgtatctcccttcaactcactatagcaggttttctgtgcataaagagaagacagagtacaggccaaggccaatactatcaatagttttttcatggttaaaaagttattattatttcttcaaggtacacgaatcctgtaacctttcgttaaccccatcaagtagctgattgcctgttaccttacggttacttcctgtaatttagcccatccggcattcaacatgttctccggcacagccatttccaagccgatcgcattatccttggtagtatcaacaagccccactgcccaataataactccccggagttactcctttgagacgtaaatcaaaagtgtaaactgcagggatgccttgcatccatttggataagtctgtctgtttgtccacaaacaccttctgcaccctattccgactgtccatcagcgcgaaagccactttatatttttggttccattgcggaatattggtggggcaatatccccagccaagattattccaacggtgtataatccgaagtttctgattttttgccacatctgtaggtaaagaaatcatatccggatagagacgatagccgccttccgaaataaaccgttgcacaagagggaatgtattgtgaaaccacgattccgtttcacccacacggaagtccatcatattgacacgcgcctctttactatcatcgaattctccctgacgcacatcttcgggatgtcccttccgataattgcggggatccacccaaaagctgtggattttgcctgtaatccatccgccttccatcagtatggggcgaacgccgaaatatttcttggcaaagtcacgttcccattcaccataatacagccccataccgaatgcgtcatgacgcaaagaatatcctttttcaactacttcatcaagcaagaactcactgtcaaggtcatacttattatcgtcccagtccttaccggcacccacaaaacgatgatagttgatgacaaccggaacgtctctgaatgctttcagatacaagtctgccagccagtcaagtacaggtttacggggcttttcatctcccgtagaataaagcgtagtgtgatactcgccccactttcccagacctgttccgtcgataaagtccacctcgtcaggattgccaaagtctttggctaaagcccaaacgaatttttcataatacttttgaaaaatagggtcatcaggataaggtgaccatcttcctctccacacgaagcccttcgtaccagcctcccgcacaaagtcgggcgtaaagtcatagcctttatcacggctgtcgaccaccacccggaaagcaagacgcatttttcttgcacgtgctccctcaatcagcattttcagcatgggatccgtattccagccataaacgttttcttcaggattcaacttcctccaactggtacggatataaagagtatgggcataatcggacacctttaccgttcccacaccgggtacctgcatattgtcacacttctcccagaaatcttccttcacaccgggggtggcataaagcacccagccggtttgtgggttacgcaacaagcgctgcctgtctggttctattcttattatcttgttatcccgtgccaagttctgtttcaaggttccggcatccgacccgccgcttatggcagcggcttgaagcgcaaacgaccctaaaaatataggcatcaaaagtcctgatctcattttacctttaatcatacaactcattatacgtatttacttattttaccgtaagtgtctgtaatttcaaccaaccggaatccagtaggttggcatccttgttcacggccatttcgagtccgatttcattgtctttggtaacgtccaccaaacctaccgcccatgaataggcaccaacagaaacgcctttcagattcaacttggtggtataagtagtcggggcttccttcagccaagtcgacaggtcggtttgctcgtccacaaatatctttttcacttcattattatcattcagcaatgcaaaagccactttatatttctgattccaagttctgatattagtaggacaatatccccaacccatattgcgccagcggtgaacaacagtaacatcctgaccaccatttgccgaaacaggcaaagaaaccatgtccggatagagacggtaaccgccttccgctataaaacgctgtacataagagaacgttttttcaaaccatgattccgtttcacccaaacggaagtccatcgtattgacacatgccagcatggaatcttcaaactctcccttgcggacatcttcgggatgaccttcccgataacgataagcatcatcgaaataccaataacggtgcgtgtcggtcacccatccaccttccataatgataggaagcttatatctgtatttcaaggcaatatttttctcccaatctttataatagccactcataccaaaagcgtcgtgacgcaggatgtatccgttattgagggctatgttcagcaacggctccgcatcaggcggcactgtttcctgccaagaatcctgataagtatcgcccaacatacggtgatagttgatcaccagaggcactttcgtgaaatgacgtgcatacaacgctgtaatccactccattacctgaaacttatttccatcgttagcataaatcatagcgtgcgactctccccatttacccaatccgtaaccgtcaataaaatctaccttatcggggtcattgtattggcgggcaaaagcctcgataaactctccatagtgcttttggaacacttggtcatcaggataaggacacttattgtttgctgtattataccatttacagccttcatcgaatacgaactcaggagtattctgtttttggtcgcgcccatccaccagtacacgcaaggcgatacgtaatcctctatcatgtacacttttaatgatacgtgagatatcggagctagggtcatcccaagcatattttcccttttggggctccaatgtcttccaattcgtacgcaagtagcaggaagaagcgtaatcggagacttttacgtattttgccagatcgggtacatacatgtggtcatagcctctttcttcccaaaatgtctcgtttttctcacgcgccagatacagtacccagccattcagaggattccgaagaacacgtgtcttattagggttaatccgcaccgttacattctcggcaggcaaatccccatcaccggtatttcccgtttcactttcactatccgagcaggcaattgctaccatagccccgaagagcaacactcccaaaggcatcattattcgtttccagttcattctcatataattattctttaaaaagaaggatatgccgccctaaaaacagggcaggcacaccctcttcagtaaatgactttaatattcgctcatgtatatccgcatatttcttaagtcgacgatggtgagcaacggtctcatgtaccatgtgaacatagcttcacgatactgttcacgagcttcgctttccgcatggataggtgtccaggtgttcagtttcaactcttgcttgtatttccatcggctatcactcttgtccagcgcaagtatatcgtcaggaattacaggaacaagacaccatgagaaatggggaccaccgggataaccgccttcgaaatgcggaacatcaagaacaaacttaccgttttctttcttatccgaaccgcctccccaagcggaagtccatgaaatcttgccgacaagcagttgcggatcgaccaaactcggcttgaagccgccgcccttcagatcattcccccacttggtaatgtcgccatatgcccaaaggttggtaacatctacatcatgccatccattaagtttatccttaaaatgcgccttatatggttccagcttcttatccggtgagtaaattttcagtttccgggtttccgtgttcaatattacacgatattctccgtctttaggcaaattcagcatcgcaggctcatctcccaatacaacatctacctcttcaccgtctacccagttgttaacgccttctgccagttggatataagattcaccctgttctgtttccaaagcaatccccatctcaccctgcactaaatcttgtacaaacgcatattggaactcattctccatggttttgctcattaccagcttatcattgtcggtagaagttccggaaagaacaatgcgattggcttcccataccaatggacggtaaggacgcacatttacagtaacagtacgcacttcgggcatagcataacggggaccaccctcccattttgcaatgacacgaaactgcacgggcaccactttggagtagttctgtccccacttatccaccagcaacatttgcagctcttcagtggtataactcttattaaatactccatagtcctcatcaacacgtacacagctttcaaactcgtgtccttcaatatctattttagtcacataagagatagcatagtcttcgggcatctcacgagccggtgtccactcaaaactcaccgccacttcattcggtctgtccctatctaattctatatcggtagccgaaacagtcagttccatcttctcaccggggttggtgagccatgtcaaatcagcttctttatcatctttacatccgccaaggataaacagtactaccaatggcagatatgcataaaatagtttgtttctcatatttcttattgattttatagtgttaatcaattcatccaacccggcatctgtttcaagttcggattcttgtctatctcatcctgaggtatcggccaccaataacttttgaacttacgagtttgataacgcacacgtttataaaactcatctctattccccttttcagccagcatgttcataccatagaagttaccattcagcacattctccgcctctttccagcgacgcaggtcgaaccagcgcaaaccaccttcgcagttcatctcaactcttctctcacgacgaatcagtttacgcatctcttccgggtcggtaggaattccgagctttttttctcctgctgcatattgcggaatgccggctctttcacgaattttatcaatgtatttcacaatatctgtcttgtcggcatcataagtacctttagcaatactatactcgagtgctgattctgcatagctcagataggcttcagcaaggcgataaagaataccttgacgcgacttatagctaccggtattcgttgaatgaacgaaagtaggatcaacatgcttccgaatcaggtaaccggctgacgggttatcgtgcgacggctgcccatcttcaccattaaaaaagaagttggtcgctttccctttcccccaatggtactgttcgttgtagaccaccgaaatatagaaacgaggttcacgattacaatacatattgaacgtattctttggagcaacgacatgacggtctccactagctttggaaccggctacggcataatgccaattagtagcacgcacatcatcttctgtagaataacctgtttcactatatccggactccaaatcaacaatggctgtttgtgtttcaccactattgttgtatcctaagataggcattttaccgtctttcataaagaaatcgtccaccagcaactgagtaacacctagcgaaccagacccaccagcaccacgaggaagagcttggtcgtcaaaccaacctgcattatccttagtacgcgggaaaataatttccgtattgccttccttataacgaagcatcatcatgttctgataagaaaggaacggatcaatagttactccatcagacaaatattccttatataaagcgtgtcccgctttctcggcttcttcaatcagcagtttattggcgtcttttgcccgtttccaatgattttcattgaaagtggaattaaagattttcactccatctacattagtcatagcctgcatttcaggatccatatctttcccaggactaggattcaccaaatcactggcagcaaacgtcagcaaacgggcacgcatagcaagacaaatcagtgaagtgatacgaccgtatttattggcttcgtcataagaagcgggtaactgtcgggaagcttccaacaactcgttagccgcccagtctacaacaacatcaaaaggttcttgtttcagtaataaagattcccccgatagttctacagccgcttcccgaataataggaactgctccgtacgtcatcgccatcatagcgtggtagtaagcaatgaaaaaacgacactccgctttcatataattaatctccttttcagatacatcggacaaaggatgcgcatatttaatcaaagtgtatgcttgacgaattgcctttggatacttatcccaataagtcactactcccggactgataggcgtccagtttccattctgatactgaatcgccttaaatccctgtgactcccaccctacagaaggtgcaagttcgtcaccaatggcgtccggaccgtcataaatataaaactccggcattacagaatagagataggaaagccaacgttccagattgcccctgttggaaaatacattctccaatgtcagctggtcatccggcattttgtccagataatcagagcatgaagttaaaggcaatacacccaaaacgcccaataatatatatgtaataattctgtttttcatatcatatttattttagaaagtaatgtcaaaacctactgatactgatttcatagccggatatttagcaccgtcaccggttgccagctccggatcccacagattgaacttggagaaggttagcaggttcgttccacgcacgaaaacacgggcattggaaatcacaaacccctgcaaccatttcttcggacaggagtatcctaattctaaatttttcagacgcaggaaactcatattgcgcaaccaccaggtagacttctggctattattggcattcggtccgtaatcggcacgcggatagaatacatcctggctttggttatccaccgtccaacggtcttgatagttatcaaagatattatacatggagcctttattggatgccggcataatatttgaagaaaggatacgccaagtacgtccaataccctgaaacattgctccaaagtcaagctctttccagcgtaaattcactccgaatccgtaaactatctccggattctcggtacctccgatagccatttggtcataagtatcgataaatccgttcttgtccagatccacatacttgatatcacccgggcgaacttttgctgtaaaagtttgtttcggaacaccatctttcaaaactccgttctccacatctttaaaatcatcttctgtaaacaaacggtcgtggacatagccgaaaatctgccctaccggatgaccggtttcagcacgagttgttccaatggttcccaaaggttcatctttgtcgatgatttcattatgggcataagtgaagctacccatcagaccgataaagaaatctttgccgatttgcttgttgacattcaacgttacttccgctccctgattcttcactttaccacggttgccccatgggttcctatagaaaccggaggtagcaggaatagagttcaactctacaaggatgttgttacggcgttcgtcgaaaaaatctacctgaaggtctaccataccattgaacagacccagttccaagccaacgttggctttgtttacaatttcccaagtcaagtcaggaataccgaagtcgccctctaccatgttattacgtccataatctccgtccaacccccaacggtataagtcaggcacatcattccattgatcaaggatagtggatatataggcgaaacgacgtcctttcagattagcattacctacctgtccgtaggaagcacgcaacttcaatttagaaatcgtgttgcgaaaaggctgcatgaaaggttcttccgaaacaatccagccaacagcagccgacggaaagaaaccatagcgttttcctttggcgaagttttcagtaccgttgtacccaaaattgaattcggctacatactttccactgtaggtatatgaagcacgtccggccaatccctgattacggtaaggcagcgattcccccttatcgtaatggcgacggttgaagagtagcatggcagatacggcatgtttgtcagcaaaggtacggtcataattcaggctggcttccatatagatactcttgtcaccatattctgccgatttggaagtacccaagaagttaccaccttgttgtttttgggccagaatcaattcgccctcttcgtttctgccgctagcggcattccaatattctattttcttggaacgagtcactttgccggtagaataacggtcaaatgagaaagttccttttattttcaaaccgggagtcaaaaatttcaggtcttgctccagagaaaacagcgtctcaatcttactggcagtggaacgggcgaaaccgctctgagtagccattgcccaaggattaccctcttcctgccaagcaggaatctcaccggatgaatagcggatgggaaacatgaagggagtgaaacggaacgcacggctgaaaatttggtccgtactttcaggtgaagagttacgatcctgaagatatcccccgatattaaaacgaacttgagtggtgggagagagtttcaagtcaacattggaacgtacattgtaacgttgcaatttgatagtaggatcccaatccaggctcttgtcgcgtgtaagaatgccacgttcgttgtaaaccgcagccacaaacgaataacgcaaattttccgaaccaccggatacatctactgtaatacgttggttggcagcatggtctctagaaatagcatcaatccagtttacatcaggatacaaatcggggtcatatcccgcacgtgttttggcaatccggtcggcatacatcggagactgtccggtatcatccaatacatcatccagcaactgcatataatcggcagccccgatatagctgggaagttttatcggttgcgtgaacgcaaattccgatttcaccactacccgaggcttacccacatgtccgcgcttggtattaatcaaaatcacaccattcgcaccacgtacaccatacactgcactggcagccgcatctttcaatacggagaacgactcgatttcttctacatcaatattattcaggctacgttcaataccatctaccagcaccaatgggtctttacccacatcctgaaaggtactgataccacggatccaaaacgaagagttatcgtatcccggttctccggaacgctgcacaccaatcacacctgtcactgtgccagccaaattgttactcaatgaacgggaagtagaaacattcaattttgccggttcaacagttgtgatagaacccactacagactctttcttttgtgcgccataagccacaacaacaacttcatctaactgaccaacatcttctaccattatcacattcagtactctacgattattgaccttttcatctttcgggacaaagccgatatagcggaaggaaagttcagcatatttatccggcacagcaatgctatatgcaccattcatatctgttatcgcattcaccgtagagtcttttttcataaagattgaaacaccaatcaaaggttcacccttctcatcggtaacgttacccacaatcttaaaacctcgaacttgctttatcgcaggagcctgttccggcactgaaatcgtaatctgtcttcccgacattttataattcaaccccgtttttgagaacagctcatttaatacagcatctattttcttattggaaactgaaatggagactttgttattcagattctttttcacattctctgaataaataaatatgtacttactatgtttctcgatataatctaagatatctttaactgtagcattctcatactgtactgagaatagatcttcttcggaattccaactaatagaattagcaccgaatgaagaaaatggaatcataaaaaagacgtttataatgcaaaaaagcttaagtcttttctttaagtgtaaaaaaatacttttctttaccataaaaatttctttttaggttaacaattttggatttattgatttaacgaaggaattaatatcgggtaaatacgccaatatttatccgatttttttgtgtatcatgaatagtattatctgtttctcataggctatattggttttataagattaattaaattgtcattatttactcaagtatatactagtatcacttttttctacttcaatagggattgtctgccggatacattcaatcacctcatcaatatcatctttcaaatccagttttccataaaccttttctttacctaccatcggatcgcattgaataggaatgccataataaatactcaacttctgaatgatatgagataaatcattaccatttaacaacatgacaccatccacccagctaatatattcggctacgtccacttgcttctgataggcaattgcgccattggctatattcagcaaatcactaggtaccagttgcgcttttctctcattcctatcggtcacctcaacagaaccttccaccaatacaatattagttgccctccccttgtagtttgaaatattaaacttcgtacctaatacccgtaatttgaaatcttcagattctacaatgaaagggtgttgcttatcatgagcaacttccagaaacacctctccctgggcatatattttacgaatatctccattaaaacgacaaggataaatcacctttgattgagagttgacaaccaatcgggttccgtcagacagttcaacccgcactcttttccctgcaggaacaagtaactggttatattccggttcggcctttactttcttttcctctttttctcttattactttagaattaacagtaacctttccttcttttgaataggtaacaaaagcatcctcatccaaattgagctgttctttagcagtgataagagtcacttcttcaacagactggctgtccatctgttcggcaatagcctgaaaatctaaattagtgttttcactatgagttaagaagtggatggttgaaatacaaattaaaatagaagctgcgacagaagcagaagctactaagaaataatttcttcgacgcctcattacatctctccggatcttttgtttggttcgctctattatagaagaagcatcaatcttttcatgcccgcatttttcccaaaagaatttcagtttcccgccttcaggtatagtagtaaaatcatcctcaagcttttcttgagaattcagtttaccaaataaatcagcaaggcaatggtatccttttaagtccataatcttctttaatgttgttttataaataaagacgcaacattaaaaaaaatctcctagttaaaaatgaactttttttatttttctcgaaaagtaaaaatagcaagaagctcttttaaacaattaagccattaaaatacagacaattaacagtataccttctatcatttcttacgcaaaaccagattcagatttttagcaatttcttctaaagcaaaagcaatatgattattgatagtcttcacagatatatttaatatgtctgcaatctctttataaggtaacccttctatcttcgccaagaaaaagacatgtttacatttaggtggtagctgttggatagcattgtttattttctccatctcctctttactaatcatcgcctcgtcaggtgactggataggagcaaatataaaatcccctataccgtcaagcgataattcagtttttcccgtttccttcctcaaataagaaatagctttccgataagtaatcgtctgtatccaggcattcatattttctataccacccaaggtttttctgtttttccaaacctcatagaaaacatcacttacaacctcttcagccggttccttttgaccaatcaaagcaaaaacataatgatatagacgtgaagaataacgttccataaaacggcaaaaagccgcttcatcactgtttataattctgtctatgtcattactttcaggtttcacggaagtgttttacagattatttctaattaacaaaattgtgccaaatatagtagtatattagcaattataaaaataaaaaaccacaaaaacgaattaaaagttatcaattacgaaagattaaaaagtaacttggtaggacgtgccatcagagacagattcttttacgcctcacgcaataagttttcaaacatggggttcacctttcaccttttcgtcgaaaccctttattcatcgatggtagcgggtgaaggctcttcttttcaccgaatttttctctctgaatgctgtatcgtccttactctagtggttctttttcaatttagttgactagtcattgtaacccactacttcatctccaatctattaatagataagttctgtttcattaggagtaaagttactttcgtctaatagtaaagttatttccgatagtacggaaactataaacgcaaattctgatcatataaatgcaagctttgtttttataaacgcaagtttcatttataaaaacaaaacttgcatttatagtttgcatccattgaaaaacaactttactcctagaccaaaagaagtttgcataggagcaaaagcaacttatccagtaatagactacatgtaagctattactaaattacataaaagaatgactcaatcatcattcatgcatttgcatccggtacaattcatttttctaattaaatacgaggtgaaggagtgccccttcacccgctatcgctgatgaataaaggatttcgaagaaaaggtgaagagtgaagggtatgttctcaacatttcctgtatggtcacttaaagtgatgcttttagcaatcagaaagcatcgggacttttgaaagacccaaatattgatttataaaagcctcttacttaaataacgtacaggataccacacagaaaggaatccgactgccaaaacggtgataaaaataagtaccacatcccaagcatgaacgctgacaggataggcgtctacaacaaaagtaccaccaccgcctcccaatgaaattataccaaatttctgttggataaaacataggattaagcccagggcaataccggagatagcgccaaaaagagaaatgagacgtccttcaaagaggaatattcgggagatgagtttatcactagctccaagactccgcaaagttactacatcatccttcttatccaagatcaacatagaaagagagcctatcacattaaaacaggctatcattaaaataaaagtgaggaacaaataagagattagtttctctatctccataatacggaaaacatctgcctgttgctgataacgattctgaacaacaaaatcatcacctagtatgttttctattttagattgtaccgatgaagtatttacattaggtttcaatttcaattccatcgcagagacttctgttgtataatccagaagctgacgaagaaaatcgagagaagtcagaatatattttccatcatattcttgctgattcaccacaaatacgacacctggagaatacagataatcacggttaaaagaagcgccgggatttgccatgttcactttgacatttcgcttgggaagatatacctgaagaggatcgacaaactccaaaccagttcccaaggtcgcaaccaattccactcccatgacgccataattcacgatcgaatcatgaagaacgaattctcccgcgccataaagtatgctgtctatggccgtcaactcttcaaaattatcttccaccccttttagtacaaccatagcctgacggtccttgtattgcaccattgcattctcttcgagcgtctctgtaaacacctccacttcaggaagcgcacaaacggcacgaatccgttcatcttgtgcatcaaaaacctttccttcacggaccgtaattttcaactgcggatcaaaagccgtaaaaaagctggccaccatatcctgaaaaccattaaaaacagaaagagtgcaaaccaaagcaagcgtagcaagagccaccccacatacggaaatgccggatatgatattaatagcattatgctttttctttgaaaaaagataacgcctggctatataaaaagggaagttcacctctgcaatgagttatttcacttcagcaatgaatctattttctcaatataatccaatgaatcatccacgaagaatttcagttcaggaatgatacgtagctggtgacgtacacgagtcccaagctcataacgaatggatttcatattgttattgatattcttcaccatctcttctgctttctctgaagggaaaacactgaggtagacacgggcaatactcatatcaggactaatgcgaactgcgctaacagagaccaatgtacccggcatggactttgtttgaagcaggaatatctcacttagctctttctgcaacaggcgagatatcttattctgtctggttgtttccataagttatttactgttttacgatttactacttactattttcttccttatgatcgttaatccgtcacgcaaaggaagtattactttttccactcgcacatcttgtgctaccaaatcattaaaggctttaataccaattgtttgagcgtccgtattacgaggctgttcaagcacatgtccgtcccacaaagtattatcagcaatgatatatccgccttcggaaagatacgccaatgtcatctcgtagtattcaatatacttacgtttatcgccatcaataaaagccatatcaaaagtaacacctaaacgcggaacaagttctaaagcatcacctatataaaaacgaattttatcggcaaacggtgatttctccaaccatggacgggtaaagtcctcttgttcatcattgatctcaaacgtatgcaacagtccaccttccggcagaccttccgccaaacaaagggcagaatagccgctatacgttccgatttccaatatctgacgaggctgaatcatttctacaaacatcttcagcatccgtccctgcaaatgcccggaagccatacgaggacgaaggagctttacatgcgtatcccgatagagcgatttcaagtaatcgctctcgggatcaatatgctgcaaaatatattcgtctatcgattcggtttcctgcataaaacttacctctttaaaaattaaagataacggttgttgttaggtaatacagtctcctctgcatgcttcaaagcatcttccactacattaatttcgaggaatgaggtctttgttcctgccttaccactactcaaatatcctaccatatcggaaggctgcaaacggccttctttcaacagacggcgcaatgccgcaaagtaatattgctgtccgttagccaattccggcatatagatagcttccacaccataagacaaagccaaatgacgcattgtcttttctttatagcagatagccagcactggatactttccacggaaagcagccaggttacgagcagtgcgtccgctataactatcagtgataatagcacgtatttttagcttagaagtagcttttactgcttgtttagcaaggaacgccgtaacatcattactattctcatctaacggaatacggatatcattttcttccagtttatctttttctgcctgagccgcaactttagtcattgttttcaccgcttctaccggatacttaccataagcggtttctccgctcaacatcaaagcatctgtacgatagtagattgcattggcaatatcagtcacttccgcacgagtcggacgaggattatttatcattgtatggagcatttgagtagcaacgattaccggcttctttgccagaatacacttgcgaatcaatacacgctggattcccggaatacgttcttgaggcacttcgatacccaagtcaccacgggcaaccattacgccatctgccacttccagaatttcatcgatattatccaccccttcctgattctcaatcttagcaataatcttaatatcactattatgtgcatccagaatttcacgtatgtcaagtacatcctgacggttgcgcacgaaagagtgagcgataaaatcaatatccttttcgatagcataaagaatattgttacggtctttttccgttaatgaaggaagattgatgcgaacacccgggacatttacgcttttacggcttcccaaagtagcatcgttcttaacttcacacagcaaataaccatccgtcttatcaataacttccagttccagatcgccatcatcaatcagaatcgtaccaccgatattcaggtcagacacaaagttcggatatgaaacagcaatacattcacgagttgtttccaaatccggattacctacaatctttactttctctcctattttatatggaatcggctctgcattagccgtcgtacgaacttccggaccttttgtatccatcaaaatcgcaatacggttggacacagcacgtacatttgcaatcaaagcttcaaaaccttcacggctagcatgcgctgtattcatacgcactacattcatcccagcttcaaacaactgttttataaaatccacatcacaacgtctatccgagatggaagccacaatcttagtctgtttcaataacatagtctttctacctattatatattattaccttatttattatctatccaataaagcctccaaagccaaacggtacgaatttagcccaaagccacaaatcactcctttacaagcacaagcaatcatcgatacgtgccggaaagactcgcgactatgcacattggaaatatgcacctcaatcaccggagatgtcacagaacgaatagcatcctgcaaagctatggaagtatgtgtatacgcacctgcattcaagattataccatccacatcaaatcccacctgctgtatgcagtctatcatttctccctcgatgttcgattgaaaatagtcgatctccacgtcaacgtatcttttgcgaagatcagccaagtaatcttcaaatgtaacgcttccgtaaatggaaggttcacgcttacccaacagattaatattcgggccattaataatttgtatcttcatcgcgcaatcctgtttttttatacctttgtatctgaaagaatgtgcaaaggtagaaaaaagaaatggaaatcaacgaaaaaaagcataagaaggaacaacaagagctgataatcaggaagtatcagcagtatctcaaactggaaaagtccttatctcttaatacgctggatgcctatctgacggatctggacaaactgatgagctttctgacattggaagggattaacgtattggacgtatgcctgtccgatcttcaacgttttgcggccggattacatgacatcggtattcatccccgttcacaagcccgcatcttatcaggaatcaaatcatttttccgttttctcatcctcgaaaactatctggaagcagaccccagtgaactattagaaggccctaaaataggtttcaaacttcctgaagtactgactgtggaggacattgaccggattatctccgccgtcgaccgcagcaaagctgaaggacagcgaaacagagctattttagaaacactatacagctgcggacttcgggtatcagaacttatcacccttaaactatccgacctctattttgatgaaggctttatcaaagtagaaggaaaaggaagcaaacaacgactcgtaccaatctccccccgggctattaatgaaataaaactttacataccagaccgtaaccaaattgaagtaaaaaaagggcatgaggatttcgttttcgtcagccaacggagaggcaaaggcctttcccggattatgatctttcacatgataaaagaattagcggaaaaagcaggcattaccaaaaacatcagtccgcacactttccggcattccttcgccactcatttactggaaggtggagccaatttgcgagccattcaatgcatgctcggacatgaatctattgcgacaacggaaatctatacacacattgaccgcaacatgcttcgtagtgagattattgagcatcacccgcgaaatatcaagtaccggaaagaaaaagaggagttatttcattaaattatgataaaatcgcccccttatctatataattatattaagaattaatatctttgcgttactttttctgtgtgagcagaaggaggttggcaaatagacgatatttcaattacaaacatttaatttatacctaaaatgactaagaagttgtacttgcctttactcatggcaatggttgttgcattattctcttcttgcagcaaaaaaatgggtgaattatcagctgattacttcactgttactccgcaagtgctggaggcagtaggtggtaaagttcctgcgaccatcaatggtaaatttcctgaaaagtatttcaacaagaaagcggttgtagaagttactccggttttgaaatggaatggcggcgaagctaaaggccaaccagctactttccaaggtgaaaaagtggaaggtaacgaccagactatctcttacaagatgggcggtagctacactatgaaaacttcttttgactatgttccggaaatggctaagtctgaattgtacctggaattcaaagctactatcggtaagaaagtagttactattcctgctgtgaaaattgctgatggtgtaatctctacttctgaattagtaaacaatacattaggtaacgccaaccctgcattgggcgaagacgctttccaacgtattatcaaagaaaaacacgatgctaacatcatgttcttgatccaacaagctaacattcgttccagcgagttgaagactgctaaagaattcaacaaagaagtagctaacgtaaacgaagctgctaacaagaagatcagcaacatcgaagtttctgcatacgcttctcctgatggtggtgtaagcttgaatactactcttgctgaaaaccgcgaaaacaacacaaccaagctgttgagcaaagacctgaagaaagcaaaaatcgacgctccgatcgatgctaaatatactgcacaggactgggaaggtttccaagaactggtttctaaatctaacatccaagacaaagagttgatcctccgcgttattgcaatgtatcaagaccctgctcaaagagaaagcgaaatcaaaaacatctctgctgtatacaaagaattggctaacactattcttcctcagttgcgtcgttctcgtttgactttgaactatgaaatcatcggtaagtctgacgaagaaatcactaaactggcttcttctaatccttctgaactgaatgtagaagaattgctgtatgctgctacactgactagcgatcctgctaaacaagaagctatctatactcaagctaccaaacaattcccgaacgattaccgtggttacaacaacttgggtaaattagcttaccaggctggtaacattgacaaagctgaatcttacttcaagaaagctgccagtgttaatgctactcctgaagttaacatgaacttaggtttggtttctttgatgaagggtgacaaaactgctgcagaagcatacttcggtaaagctgccggaacaaaagaacttggcgaatctatgggtaacctgtacatcgctcaaggtcaatatgaaagagcagttaactcattcggtgactctaagactaacagtgctgctttggctcaaatccttgctaaggactacaacaaagctaaaaacacattggctaacgtaacaagaccggatgcttacactgactacctgatggcagttttaggtgctagaactaacaattcttctatggtaacaagcagcttaaagagcgcagttgctaaagattcgtcattagctaagaaagcagctactgacttggaatttgcaaaatacttcacaaatgcagatttcatgaacatcattaaataagagaattaccactctattttaaatattaagaattgcctgtcattataaatgacgggcaattctttttttttatctgtaaaaaccgtactttcgcagaaaagaaatcaaagcaatgaaaaagagtagcattttaatcctcataatcatttgtctatgcagttgtggtaaatcttcaaagaaggttagcataaccggggaaatcaaaggcctgggcacagatacgctttatctgtatggaatggacgaatcattcgaccggatagataccattttcgcgaagaacgataaattctcttatacagcttcaatagacaccattacttctgcctttttacttattgacaatcagacagaatatccaatcttccttgacaaaggaaatcagatcaaaataaaaggagatatcaatcacccggaatatctggatatcaatggtaatatatataatgaagagtttacaaactttcagaaagaactaaatagcctgcctaccccatccgagaaagatttagagcaaaaagcagaagaattcatcacggcacatcattcttcttttgtcagtctttacctgttggataaatactttgtgcagaaagactctcctgatttcaacaagataaagaaattaattgaagtcatgacaggaatactgcaagacaagctatacatcgagcaactgaatgaagccatttccttgtccgaaaagacagagataggcaaatatgctccgtttttcagccttcctaacataaaaggagagaaaattacccggtcatcagaagatttcaagaaaaagaacttgttaatcaacttttgggcttcatggggagatagcatttccaatcaccaaagcaataccgagttaaaagagatctatcagaaatataagaagaacaaacatatagccatgctcggtatctcccttgatatggataaacaagaatggcaggatgctataaaacgtgatacgctcaattgggagcaagtctgtgattttggcggactaaattccgaagtagccaaacaatacgccatcaagcaagttcccagcaacattcttctgtcggcagacggtaagattctcgcgaaaaacctcaaaggagaacaattgaagaagaaaattgaggaagtagtcactgctgctgaagaaaaggaaaaacaagacaataagaagaaaaaataatcaataatcaaacgtgttaattaaagtattcggagcggctgttcaagggattgatgcaacactcataacaatcgaagtcaacagctcgcgcggctgtatgttctatctcgtcggccttccggattctgcggtcaaagaaagccatcaacgtattatctccgcattgctggtaaatggctataaaatgcccactagcaatatagtagtcaatatggcaccagccgacatccgaaaagagggttcagcttatgacttgcctcttgccatcggattgttaggggctaacgaaacaatctcttccgagaagttttcccgctatttgttaatgggcgaactaagtctggacggaagtatacaacctatcaaaggtgcgcttcccattgctatcaaagcgcgcgaagatggtttcgaaggactaatcatcccccaacaaaacgcacgggaagctgccgttgtcaatcaattaaaagtatacggagtcagtaatatcaaggaggtcatcgaattcttcaataatgaacgcgaattagagccgactgttgttaatacacgggaagaattctatcaacaacagacaaactgtgacttggattttgcagacgttaaagggcaagagaatgtaaaaagggcactagaagttgcagcagccggagggcataatttaataatggtaggtgctccgggtagcggtaaatcgatgatggccaaacgccttccttccattcttcctcctctttctctgggtgaaagtctggaaaccaccaagatacattcagttgccggacaactgaaacgcggttcatcattgatttcccaacgcccattccgcgaccctcaccacacaatttcccaggtggcgatggttggcggaggtagttttccacaacccggagaaatcagtctggcacataatggggtacttttcttagatgaattgccggaattcaaccgaggagtgctggaagtgttgcgtcaaccattggaagaccgccagatcactatttcccgcatcaaaagtactatcagctatccggccaatctgatgctgattgcatccatgaacccatgcccctgtggatattacaaccatccgacaaaagcatgcgtatgcagccccggacaggttcaaaagtacttgaataagatatccggtccattattagatcgcatcgacattcagatagagattgtacctgtaccctttgataagatttccgatcaaagacagggagaatcgagcaatatcatcagacagcgagtgataaaagcccgtcaaatgcaggaaagacgctacaccgaatataccggaatttattgcaatgcacaaatgaacagcaaactgcttgcaatgtacgctcaaccggatgccaaaggacttgcattgctaaaaaatgcaatggaacgactcaatttatctgcccgagcctacgaccggattttaaaagttgcccgtacaatcgccgatttggaaggagcagaacaaatactccccaatcatttggcagaggctatcagttatcggaatctcgacagagagaactgggctggataataacaatgaatataaacataagagaattatttcatcgataacactatcttttttcatatatttgttttacatttgtgacaaacaaatatgcaatcatatgaaaacatcaataacaagtcttttaatgatattttgtttgagcatattggcttatgcgcaaactccccaggacagagccacagaactaaaaaaacaagcgcaaagcagtctcaatcaaaaagattacatcaaagcgcgttacttattcaaaaaagcatacgaagcatttgcaacccgcggaaactatccacaggcgatagaatgtggtgttcaggccaatgctttatacgtcagagagaacttttacaaagaaggattcgaactttgtcgtgacatggaccaacttatatggaccggagagcaaaatcagaagaaagtcttttatgacctccgcttcctcgtaaacaaggagcggttgcagatgtacacggcacttaaaaatccagcccaagcaaaaacacagctgaataaattggaagaaaccgctaaccttgccaagaatgactcactgacagaggttttactgtatacaaaagccaactattactatacatttaaccaaaacacgcaaggtgatgcctgtttccgcaaactgattaatcaatataaggaaaagaaagactatgccaaagtgaatgattgctacaagaaccttatcggaattgcccgtaaagccaataatgcccctttaatggaacgcacctatgaaagttacatcgtttggacagactccgtgaaagctctgacagctcaagacgaactgaatgtactgaaaaggaaatatgacgaaagccaactgactatacaagaaaaagacgacacactatcagccaaacaatacatcattataggtctgtgtgttcttgtagtcatcctcgttgccggactggcaatactggccgccatattactgaaatttatagccggcaaccgcaaattaaagaaaagtgtgaagattgccaatgaacataatgaattaaaaaccaaattcattcagaacatatcctcacagatggaaccgactttgaatacgttggctacctctgcgaatgaacttttacagaaagcccctcaagaagcgagccaaatgcagagccaagtcgctgctctgaagaaattcagcgatgatatccaggaactgtcttcattagagaattcattaaccgaactctatgaattgggtgaaatcaacgtaggtactttctgcgaaaatgtaatggataaggttaaggagcatataaaaatagatgttactccttcagtcaacgctcccaaacttcaggtaaagacaaacaaggagcaactggaacgtatccttctctatttactgaaaaatgcagcctactacaccgaacaaggacgtatcagccttgagttcaagaaacgtggtgcacatactcatcaatttatcgtgacggatacgggaatcggtattccggcagagcaacaggaaaatattttcaagcctttcacggaagtgaaagacctcactacaggagatgggctaggattaccaatctgctcacttatcgccgcaaaaatgaatggtagcctgacgctagataccagttataccaaaggaacccgtttcatactggaacttcacgtctaaattttgcataaaacgaataacttgtatcattagattactttctaatttgtttattatagttacctttagcaaagagtattccaaacgcaaacttgaaaacatacaaaaatatgaacaatttcccatataaacggatatcacgttttaaataaacctttgagtagtttattaagaacagtatttgagtttattaaaaactttgcaatcggatttccgagttctcaactctatctattacaacaaaaaggctgcaaatttcatgaaatttgtagcctttttgcctatagccgatacaccatttctgatactaatcaggaaataaaaagcatttgtcaagaacctattgtttttttgctgaaaaaataaagagaaaactaacttatatataataagatagccttctctctatttataaactgactttccgctttattctacagaatatcatctcacgatattttgtatcaataaatatcagacaataagatcttactcttgcggcatatttcccatttttaccactgaatagcttggtctgtatcaggaatcaagctattaacttttcgttccatcaacatactaccttcagcacgacaaggtacaacgatatctttatcttcatacgttgtcacatcatcatacgtatatgacatataaatcgtcgtgaaatgatgttccaaataaggagttacttcatctaaagacatgctagtcgtataagtaggcgcatctcctataagtcggaagttcatggcattagtcggatcggcaggttcagctgtcagtgtcccattttcgttaaaagtcaacacaatcttatatttatctctatccttcaattcttcactaatgactccggcatagaagaagcattgattctcactcactacatgcaaggtacgtgtacttgaaaccatagcactcgtattatccatcatatatacaaacatattggtggccccataagctcctgaataatcattaaacggcatcacacggagaagtgctttacgataattcttgcgtggattcggatcatacgagtcactatccaaaatcgtcaatggaagtacccatttatcaacaagatccagtccgctaaatttgaatttaatatcaaacaaaccttgacattccccagccggaatatgacaagtaggagaggcaaactcatagtgtttcttatccagcaattgaaaatacaagtcttcacgttgtttccagcgagcttcattcaaaccaatcaatgtatccggatccacatcaatagcaacatccagatctctttcattcatagtagagccacctacaatcaccggtagccgataagtcacttcaccgttcgcttgataacgcaaatatacatcagtcactcccttactattgacaggggctttcaatccgacattttgcacatacacttcttccacccattcattgttacatgcaccagtcagaacaagcgttaataacaatataaaatatacgatataatttttcatatttttccatttaataaggttaatcataatatgtccatcccgggttctgagtcagacgcaagtttcttctcaactgatcatgggaaatcggccagaaatacattttacggctaaaagtagtcggcaagttcgaattgatcacttgagtatgaaataagtctctttctgttttactcatatatgcattgcaaccatacatctgctgcgactcctcatattcggcatccttccaacggcgcagatcaaagtaacgactgttttctgcaaataactctatctggcgctcatgcttcaaatgcttgcggaactcatcagcattctcataaacatctgatccaaaatcgggaactcctccacgaatacgaactctggaaatagcataactcatttcattcttatcacgtgaaatatcataagactgagttccatcccatgaaggaatctgataagtactcgcacctaattcatttaatgcctctgcataccataacaacacgtcagcataacgaataccaatcacaggctttgagataacccctccctctgtcttaaagttgtcacgagaactaacaaatttcctgatcccaataccagtagccaaccaacgatcacctgaattactccagccactctcttcaccacgataataccatatgattagattccggtcatacgactgtacagcattagtaccattccataagcaaccattgtatgctaccgtagcataaaaacgtggttcacgatgtccatattgtttattcacaccttccaccaatggtgcccaatcaccactagctgcttcctcggcactcacataattttcatcacccgtccagtctttcgtcttatcaaaaggttttccggtattcatctgataggcatcgcattgcttacctgtcatagcatgacaattataacctccgaatgctattggcatctgatgttgaatcatcgtattgatatctccgttgttctgtccggttgtaaaaatcatctctttgttttccgaaggaaaaatcactccattaaaaagtgtctcgtaagactgtaacgggtcaatattccgccatcctgcaggaaaatccgcatgagaatataccgcatgcgtaggaggagcaatcgttgccggattatcaattgtaccagtagagtgagctgagaccgtatgtagctcatacacacccttacgaccaagttctaccacatcacgagcagctgctgccgcctttgcccacttttcttcattgtattcttgagccatcagatagcgtccttcatcatccaccaaatccgtgaaacgttcagtatcggttggacgcggattattgagagggctggcagcataaagcaatgcttttgcgcgagttgccaaagctgctccgcgagtaggacgtgccatattacgtgtatcacgtttcaatggtaagtctttcgctgcaagcttcatttcctctgcaatgtagttgacacaatcgtcatacgtgctacgtgggatataaagatcctcataagcagcattatagtccatcacaccatcattaggtataattggtataggcccgtacttttgcaacaacttccagtagaaataagcgcgtacaaaacgagcctgtgccttataatcaacaatttcatccggagtcatttctttatttctgtcaatattatgaataaaaatcgaggcatgacggataccatcataagcttgtgcccaggagtcttgtttccaattctcatcatattcacaatatttgaatacacgatattcaagattacggtcgctataacacatatcgtcagaaaagttagtaatacagttatctttcgaaccaatatcgatgttactccatgtcagccaagcgtatgcagtcgccaaccattgttccgaccattctttattttcgaatatattttccaaactctgggtattttctcccaatttcccctccacgctcaaataatctgaacaagaggaaaccatcattcccatactgataatggtggaaaacaatatatgtttctttttcatatttcgtattatatattaacagttaaacctaaagtgagcattttagacaatggatactgctgcccgttagagctccccatttcaggatcccataatttgaacttagagaatgttaacagatttgtcccgataaagaagatgcgtacattattcatcaagattgcacgactgatgttctttggaagtgtataacccacctctaccgttttcaggcgcagatatgaaccatcacgcaaccaatatgtcgattcacggttattgttactgttattctgccaggtcaaacgaggatatttggcatcaggattctcattcgtgccaagactccagtagtttcctactacatccgtaagaatgttaccccagtcaccaccactaaatggtctgactccaaaaccatcaataaagaaagaggatttaccagcaccttggaaatgtagattcacatcgaaccctttccatgtagcagacataccaaagccgtaaatcaaattcggacgggttgtagaaccaataggtaccctatcactatcattaatcacgccatcactgttcacatctttatatttaatatcaccaggcattactgttccccattctgtttgttgaggactgttacgtatatcatcataatccttaaatataaatccggaaaaaccagacgtgccgcttaacaaaaacgatgcgtttcaaaaagtacaaaaacgacgcgtacaagaaaaaaggtgagcgcggtcctattcagcatgatcaaagcccaccgtttttctttcacttgaaccctctttaaatggctttaaaatatcatttaaaagccattgcagattcaaaataattccctatctttatgcaatgttaggctgctatacctgacacttcatccggcttcgtgtacagcatcatgtctgtatatttagcttgatagtttacgcttgcactaaactccgctttcctgcattccttgaatgggctgccgacaaatgggtttcggtccatccagtcgcacagttctaaaatggaggacttgttcgaagtgaagtacacaaacgaatgccctttcagaacggtcagcacgtccaggtagtcagccagacgccaggacatctcgtaagtacccacctcggtggaaaggtacggcggatcaaccaggaacaccacacccggaacatccttgtaacgtttgaatacttccttgtagtcttcgctggttatagtcagtccttccagataatcctttgcttcgggataatctgtttgccgaatcctattgtagatggcttctttcttcattccttccaaactggtcacatatttcatggcgaacaacaaggatgcggaaaccgtgatataatccacgtagccgtgctctttttcttccctctcaatacgggcaaacattttatcgcgaacctccccggttatacgtttatttctgggttccccttcagctatccggcgcaaatcggataacagcacattggtggctgggatattcgcaagcctccggcggtagttgtcgaagtcgttatacacaacggcggcatcaagcctgacacatttggtaatatgtgacagcaggcccgagccgccaaataggtccacaaacacggtgctgcccgggaactgtcccagcaccctgataaaatccttcgcaaacatgcgtttctgccccacgaaaggaagcggggcggacaaatacatctttttcatttcattctgctttaaaacggccgcaaaggtccccagaataaacgaaaaacagcgggaaacatgaacggttcccgctgcaagacatatacagcaaactacacgttcagcccgaagcggaccgcctcgtcaccggcaagcagtgcgcgggttccctggatattgttctcgtagatatgcacatttcccaagtagagggtgatcgacttcaagggaagttctatctgccgcgccatcaggtacaagtggtaaatatcggaaggtagcccgaggttcgcgtcactgctacgctggtaggcggatagaaccagttcaccgccatctaactggaactgtaccagactcaaacagggtgcctggttgctctcggcaccggtttcgcccaggaaaagcacgtagttcttgctgttgcgcctctcccggttgattttcgctatcaacggaggcagcttctcgaaataggtcgggtaactgttcaccaggatggagccgcaatagtcccaccagttgatgccggcctcccggtacttctccacgttgcgctcaccctgcataaataactgcaactcgctgcggagcttcttgcgggcgatatgatgcccttcgaatatatcgagcaggtctgccggtgtcagcgagagctgctcgttcagaaggtactgtatgtttcccttcttgttggtctgtgtctttcccgtggcaaggatcttgtccaggatgcggtaatacttattcatagccatttcctccttctaaatttgaaactccctaaagataaggggaaacggcactccttgtggcataagactgcctgttcacactgcaagcgtcttgcagtcgctctggaaccgtttcaccagcgcgtacaccttgcgctcgctcaccgaatacttttcggacaatacggccacgacatacgaaactttctcaccctgatccagtaggcgggtatagtctgaatacaaatcaatataccgggcatcctccagacggattccggatgcttgaagccttttcaacagttcccggttaaagtttaatatctcaatcactttcatacaacaaaaaaattatatctttgcatcgccaatcattttttaaacacataaaaagagagaactcgtgacagagggtatttgcccccggtcgcgcgagttctctcgtcgtgtgttaaaaaagtgattggcgttactatttaacaggccgggggcttttttcttccctcccccgaagggttcattccacccggtaatcttccggatcaaaagcgtctttctttctccagccgtcagccagtgtatcctggatgtgcttcatggccttcgtgtagaagtccgtcagttcctccagattctcaaacgtccggtactggggctcctcatccgtcccgaacttgaacgtcaccgggagcatagcgccgccggtctgtacggccaaatcatacgctgccttataattgaactggttctcacttgacagccataccggcatgtcctcatagacaaacccggaaagtatctcccggtcggtctggtcgttgtaccagcccgtgatgacggactttatagtgtccggaccgggtttcccgatgaaaccctcctccatgtaggaggcggagccgtcctccctttcctgcacatcccagcggatgcgccatctgttacgtgccgggctcacgcactcgatcagtcttatcccggatgttccttctacccgtttcatgtaaatatgtatttagttcgacccttgccgaaagtttccgtcttgatggtggtctcgaacggaaagccgtcgggcatatccttcacttgcaagaggatgttcttcatctcctcgctgttggtgaagaactttttcggttcgccgttcatctcaatagccacgatacagcggtcctcgccctgttcggtcttgatgcccgtctcaaagtccttcaccacaatcggtaagtttaccagctcccggatgcttaccaccaccccgggaaaacgtttcttgccgtcctccggcttgtaggaaacgttcaagtctttaaatgatctcatgtctttgcctgttaattttttaaacaacgtatgacagtcggcgtgtttggccattccatagaatgacgctaccagttcacgccttcttcttctcgattttacctcgtgcatttttcgggcgaatttctgcttgatgcgtttacggatacggacatgctccggaccataaatcacataaccgagaaaatcgatgccctcttccaccgggaacacgcgctcgtcagattttatctgaagccctatccgttccatttgtgagtggacagcatcacgaatcatccacagttccgctttcgttttaccaagtacaagaccgtcatcacaataacgatagaaatgacggacactgtacttatccttcaaataatggtctaaaaaaatagacaggagtaaattaccggtagcctgcgagcttctaagcccgaaactgataccgctgtcaagcatcattataaaggaattgagaattccaagcagtttcttgtccttgaaaacacgggcaaagcaccacatagcaaaatcctgacgtacattgtcataaaaatggtgaatgtcaaacttataaccataccctgtcccttccggatccgtttccatgtcacgacagatgaacttcatcaggtcatgggtgccgcgtccctggatagatgccgacgttgtacgtataaagcgcctgcgcaggtgtttgtccactacggtcatgatggcatgtactccgatacggtcatacatcgtaagaatctgcaaattccttgcctttccatattcccagatagtccgttcacgataaccgctgacacggaaagagccgtctgatatacgttctgcaagttcctttataacttcctccctatgcgcaagcaggtagcgtccctggcggcttcgtttacgtgacgttccgcgaaggacctgattgaacgactccgacatgttggagtaatccgctatctcctcgataatataaccttctctgcgcataactgtttttcttggggccttcaatcccccgggcccggcttcttcgaaccgtttccggcctaccaaaccctacccgacactctgtttttcagttttccggcccttacggaccgctgttactgcggcttgcccccctcggcaccacggtggggacaagtccccggtgttgtacgccgattaaaatttcctttcgattgttgttcagacgagaaccgatgttcgtgttcgtattcgaggaatcgttgttcgcattcgacatcgaaacaccgccattcgggttcgcgttgttgttgccacgatagaccacacggcctatggggaggcgccacctttcaaatgcaaaagtactattttcaaattattatttaacaaacagatacaaaacctgacgtcaaaaaaatatttttcgacgggctgacgcccgtaatgaacggcgttcccctgctcggggaacaccggatgttttgtcgcttcgctcccgctttgacgctttacgcggccgatcatgcaacctcgcttatcgctttaaacgccacggcgctcgacgccttaacgagccggccgcggaaggccagacgagaaccgatgctcgcgctcgtatccgaggaatcgtagctcgcatccgacatcgaaacaccgccatccgggttcgcgttgctgttgccacgatagaccacacggctggaggcagtggatatgtagtagatgtcgcagtaatttgtcgaggaggaacccgaaacggaacccaccggaatcacgtccatatatttgccatgcgccacggcggtaatccagataccggagctcacggaacccttaaccaggcgggtactgccgtcaggcatccagatgcgccacttcccggaattgcccgtgtcattaggaagatccacgccgtccatcatgtcatatttatgaccatagatgtcctcgtagccaaggcagcaaatattattcacctgcgtaaccgtggccccgccgtagtcatccttctcacggtaccacgcatactggtggacggagttttctatcaggctgttcgtcacattagggttgattgaggaggcttcctcgtagccgatcgtgtccgtcataccgcggctggcagtaccacccgtagtacggttgttcgtgtgagagcccgcgccgcattgttcctggctgtcacgacgaccgtacttcgcgtagaaaagattcgcgatgcgcgagtgcataagggcatcaatctgctgcataccgcgctggacactgtaatagtggaaatcagcccaggtcatgctcgccgtagtgctcccgccggtaatgcaggcgcgaagtttggaaccgacaacactgctgcccacaacggcacacaagtgctcgtcattaggcacccattcgggttccatatcctcgatcctgtcactgttagaaaggacaaccttatcgaactctgccgtgttcagaatggagaagtgaagagcagtggcaccctccggaacatcggcaatcaggtacataccggcctcgaacttgttgctcaaggtagggacgacgattgaactgatgaccgtgccggaatcgtctgtgaaaatgcttccgacaaggcttgtaccgggaacgctcgggaaacgcacacgcttgtaaccgtccacgttcaccttgcataccgaatacgtactgtcagtactgtagctgttcgaaagcgtatcctttccgctcatgatcttacgaccggaaagataaccgccactcgtgcccttaatgtcgtcaagcgtaaggacgtcagcatccggaacggaaggcatgttatccgaaccgttactgctgtaacaggagtaatgcttgccgttcaggtaatcattgatacccttgctccagaagaagggctcgtacatcatccagtcaccttcagtgccgtccagtctggcagccgtgccgtcggcgtacttgttgctgtccgtgtcgtccagcgggtagtaggtcatctcaccgtccaggttgttcaccgtggtatcaacgttcgccatgttcacaccccgcgtcgtcgcttttttagtcactttagcaagtacacggtgacgctgcttcaggatggcggaaatatgaccgctcacctcatacgcgttgtcatacttgtagccggtaccgttgtcaaggttgctcacgttcgcgtcatccgatacctcgtcgtcgaactcgatcatcgtgtattccggctgccggatattcagttccgggaagtgcgccttcagagcgctgtacgtatcgtcatcaatgtagcgcgtgagctgtaccgtacccaccaaggcgcacgtgtccgtagtgttgccatcggaatccacaccgcccatcccgacaaacttatccagccacgtaccgtcatcctcgcggtcaataccggttactctgatacgttccacacccgtgcaacggcccagcagggtttcccagtcaatacctggacaactgtcaaagatgaaggtcttcaccttgctgtagctttccaatgtcagcccgccggtggtcagtctgcccagatattccagacggaggctggtcagtgtaccgggaaggtggagcagcgtcacgggagaacccttggctagcaccacgctctgcacctgcgtaccgcgggcctcaagttcttccagcttggtctgcgcactcaaatccagctcggtactggtacttcccccggttttcgcctgtgcctggttacgaaggttgagtttacgtagctgcttgcagttgccgatgttcaaccaccagccggtactgccgttgccggaactttgaaggttcagttcgcgcagcacggtacatttgcccaggtcgaaagcgtttttcaggtggtcggcggccccgctcatatccagcaccttcatacggctcgcgccataaaccctcaagggatcgttcaccgtataggcaccggtgatggaaaggctcgcagccgcatctttcttgatgatgccggtattccctatattcgggctgttgttcgtaccgtagccgaaagcataaacctcgttggccgtaatcttcagcacgtcgggggtgtcagcagccgtacgtgccagatagaggtcgatgttgtcactggtgaaattgctcgtgccgtacttagcatccagaagggcgaaacgattacgcacgaaatattcacggtgcgcacggttactgccctgaagggcgtagatgaacggccacaccttgccgtacatctcctgcgtggcgggcaggatgtacttcagctcgccgctcttgttataggcacggtcgcaccagttgcccgcctgctccacgttcagcatgtccaggacacggctggtggtaagtacaccgcgaagagcctgcgcctgtgtcttcaggtcagcgtccaggttggccagaacgaggttccaaagccagctgtcacggccttcaaaggcatatttcccggcctcggcgtcataagtgtcgcggtcggtggtgtagtcatacaccaggaaacagtcgttacgttttcccatctgggtatcaccgtcgtagtaggtgatgtaccatatcaggccgtcccacgtgcgcagcatcatgttcttcgcacgctggtcaacggcaaggaaatagtccgtccagaggtaatacgtcagcaggaaagccttgtcgaaatagtcacttatctcgtccctgaacttctcgctcttaaaagtggagaggtcggcgctcgtcgcaccgtccggaacacacgagcgtatccatgcgtacagccgtttcacggccgtacgctgcgactcgtcaaggcccgcccatttcacatcatccggaacgttggtctcggcaccggcatcaaacacctcctccagatgagcgtcacttgtggtcttgaaaaggcacatggcctcggtattgttcagcatttccagagtgaggggacaggcaggatcgtaaccctccacgccactaaggccgaacaggtcgccgctcttgcttttctcgttgttgaagttgtattgccccacatagttgttctcgccgtcctccgcagccgccacaaacatgtcgataggcacaccgtcgatagcggtacgcacggtgaccgcgttcaaatcgctgccgcccgtctcgtactggtaacgctgcggaggggtgagaagccccatctccttcagcacgtcgttgaacagtttggcaccgcctgtgttcagcgacatggacgagtcggaataatcactcttcagacagatcaggttcatggcgatgccaccgggacggacgggatatttcttttccgcctgctccttgccgccaacggtgaagctaaggttcgtgccgcccttgctgatatagatacggatgttcttgctcggatatttcgtggaactggtaccctgaatacggatataacagtcacgaagcacgaagtcgtattcggatccgaaaggggagtaatagaagatatccgccgaaaagtccgtcttcttgttgttctcggcatacacgtcatcgagcttgttctggcgcacgatacgcagcacccccttgcccttggcacgcagcttgtccatatccacagtgtcggtatcacccaggatatcgttctcctcatacagcgcgatcatctcctcaccgtccgcactgtccaccatccggttctccagttcctcgtcgtcactcaaccggcgggtatagatacgcacgctctttacctccacgtccgccccggcgctgtcaatggtgatatatttcggattgtcctggcggaagctgaaggcgttgtcgtagatgtcggcaccggtacggttgccgtccacataaagctccatcagacggctctcattgcgggtacccaccatgagggccaccttgatccaccggtcttccacataattcgtgcccagcttgatctcacgctccaccagctcgtcgtcctcgttggtataggacactttctcaccggtcttgaaactcgcttccgaaggggtgatataaagccccttgccactgtcgagacagtccacaactgcggtatcgctgtcagtgggattgcttacccggagggtcagttcaatggtcagccccgtacttttcacatcggtggcaaagggccggtagccgatgacggctttcgcaccgttggtcagcttcagcgcctcacccgtccagccgttgctgctccagtcaaaaccctcgaacgtggtctccacgccgttcgactcccatgttccggggttactctccccgttgctgcggcccgccgcgtcaagcttgaccgccaggccgtaggtggcctcgctgatatcgataccgctctcacccacgtcgatgcgcaaagtgtacccggtcggaccggctttcaggacaagcgtctgcgtgccttcctcggtaaaccggttactgtaggtcatcatgctgcggggagcgctcacggtactgctcttgacgccgtttttccagaactccacttcagcgggcacacggtcgggatcataggccacccagtcgaaagtgagcttctcgtagcggccggcttcaaggaccggctccagatgctcgtcccgtccgaggacatgcccgtcggcatgaatgagcttcaaaccgatgaagggcgcgccggttccggccttcagcaggtcgatatggatgctctcgcttttcagcgtgaggtcgtcagtttccatctcggccaccagctgggcggtatgccgccccacggacaggccggtcatggaaacctcgaaactgccgttcgtcgtgccgctgcgggtgaccgtatgcgcgttctgctgtacaccgtccacgtacaggctgacggttttcgtgccggtaccgctcacggcgtagggtatactcgcggaatcataggtaccgtaaccgccgttctggatggtggccgccaggttgtaaccgcaggaaagggacagggtgacgctcttcacgctcacgtacgcctgcttcttctgcgccttgcccgtggtgggatcggtagtctcggcaatgacgtagatatcgctcgtgcccaccagcaggtatttggtcaggtcaagggtataggtacccttgctcacttccttcagcgaggaggaataagtggtggtcgtcccgcgcttcacctggatggtgacggtcgctttctgtccggtactgctacccttgtcatcaccgccggcaacctggtggtcataggtataggtaagtttcaccgctccgccttccttcacggttttcttgtcggtctcggcaagcagcacgatcttggtggtggaggactcaccgccgccaccgctgccggccgggatgtcaacgctcgcgatctccgccccgctcttgttggtcagcgcaaggcggacactgctctcgtcgtcgctcacttccgcgctcatgccgaacacggtaccggcttccacctcctggaatttggcggcgacggtcttgttctggacgggattggtactgtcggcatccaggctctcgtccacttccagcttgtcgatggtcagatccacgttgccctcgctgtcgggaactttcttctcgccgttcaccgtcaggctcttcatcgttccggcaccgccgaagtcctcccagctcgcctcctgctcccagctcgacagacttgtccccacgaactgtttggtctcccatttgccctgcgagacttcataggtgatgcaacggcccttgtaacggtatttctcatccacggcaccgatcgcggaggaaaggacataataaccgctctccaaagggacttccgccgtcacattatacgtgttaccgccaccgcccgtaccaccgggaatatcaacggaggcaatctccgtcccggtcttccccagcagggtgagtttcaccgtgtcgttctcctcatcagggacggccgtcatgccaccgaccaaaccatcgttcacaccggcggcggcatcctccgcctgtttcgcagccgcggatgccgctgccgcggcggaatttgcagtttcagcagcctgattggcggtaccggccgcatcagacgccatacccgcagctttattcgccaaagccgcagcattatccgctttcgtggcagacgcattcgccgtggcagcggcatcatcggccggtttacgcaaaagggtaagcggagcactcaccagctcactgccgcgaagggcggggagacttttgatattgtcaagggagctgacctccacaagttcatcaacgctctggctctcggccttgatagcgttcaggatctcctgtttttccgcatttgtcatggctaatcctccattacccttctatctgtttcactatttgggaataacagcccggagtaagaccggtgacagcttcctttatcaaaaccgcatcctccgatgtcagatccacatccgcatcggaacccataatcctcatgcaaagactgtaagcatgtaatttcctttcattatccgtctgaatattaccgctcggacggaaaccggtaccgttgaacaggcactgggagactatgactcccatacactggggtttcttatcaatcaacagcacgctaccgtcgaaatccttaaaatacacattaaaatttactttcatatcctttatttttagatatatgtcatcttaacgacaattccattaacaacctcaagggtatagttataagttataaaatcactctttacagcccactggaaggtacctgaaacaccctttcggtaactgtatgtcccatcgctggccaagctccatcccgtaccgtaattgttcgacaggatatcaccacaatacaccgccccgttcacatgcacaccaccgtcaaaatagccggcataagtattggcactgataggatagctttgaccagaggacttgctggaggcatagatagcggcaccacccagattcgagcctacggccttgacaccgaagcgtccctgcgtggcggcattaaaggacacatccacaataccctccatgtccgtttgtgagacaccaagtttcagactgcgggaatcattgccgaaataatcaccggctttccagtacaaccgtccggaatcaatcgtaaaaccgccgattttaccctcataggcatacactgtaccataaatcttggcgttgcgcgtctcaatactaccgtcttccagaatcttgaaattatcattagccgtaacaagtccctccaacgtgatattatcgcccttgatttttacgccgtcacccccaacacctacaagggatttcaaatttccatcaccgtcaatggcatacaacccggaatatttggaagtaaccatcaggccggtctcttccagcaggttctcgtctttgtcgaacaccgccgccgaaatctttaccagacgctccgactgctcgaaaagggttttataacggtgtgtcagggattccacacggtcggtgctcaatatgagcatatacaggtaaatatcaccggtaaaactcaatttaaaatcacctgtaccgttccagagtccgctacaggtgtactgtacgtacccgtcggtcgcggacagttcttcctccacctccatgctgttgaaattggcaaagcctgtcttatccacacccacaaactccacacgcagcgtgccggccttggcacagcggtaaaagaaagtcaggaacaccgggacggcttccttctccccactgtcattttcaggcatggagggaatacttttcaggttctcacgtttctggaggatgtacttgttacgaatccggacaaccgtacggccgtcatcctcggtcacgctcgcgctgtcacccttcctcgtcaagacgttaccgttcgcccagatccaccggttgcccacaaggaagaacacggtctcgttctccgtgttccacttcataaggccgttatcaaaggcggggttattcaggtagccgcgctcggtggcgaagtcattccgcagggcggtgacggaactgacgattttcccctcgactatctcgaacttcgtcttgatatcctcgcccgttaccagaaggaacgtaccacgcaggtaggcgttgtcgctgtacaggccatcaccgtgaggctggttgtctgaagggaaccagtcatcactgataccgtcaaggttgcccaaacgggcacgcaggcagccggtgaagttcttcgccttcaccacgtccatcacgtccacacggggctgcccgtcctcggtggcggagatcaggatcaggttctggcgcaacggattctccgtgttgcccatcagcacgcactcgtcaccagactccggaagagaagcgccgaactcgtcctcgcccacgaggatggaaccaccctccacgccggccacctcaacccaatagcttttcaaattcccgccgctgaaggtctggcagcgcatgaggtcatgggccacgaaagtgttctcctgctcgaaagtgatcctccagtaaccgccctcaagaacagcggtctttattttcccgttggcggcactgacacaaagctggccgccgacgctgcgtaccttctcgataagcagctccaatactaccatgacctggcgtaccgtcagcttgtcgatggtcagatgggacaaagcgtcctccatccagagccgccagccctcaccgaaaagaccgtccacgaatttcggactgcgaagaagctcacgcacaacaagggtcagcagcccggcattgcccttgtcatcaatacccgcattatcctcctgtccgaaagaggctcccgcttcgaaggtgatcttcccctttgcacggtcattcttttttttgctgatgtgttccgcctggcttctccgcgcggaaaaaagattgttgtccgtaggcagtgtcttgtcccagctacggataatgtcaggaagcgcggcaccctccgcctttgacttcgtatagtttttcagttccccgatactgtcattcacccgttcaaacgcaccactatgcagggcatcgctgatctcgatgtccatctccccgggttggttcactttccgggtaattttcgtgatacggctgctgcgataaccggtttcggggaaatactcctcgctttcaagtctcacacgacggcctacggacagggaaacaccgttctcctcaatccacacatggtcggtcggggccttgtaaacggcaagatcctgccagtgttcggtattgaactgttccaccgccgtaagaaactcctcctcggcaagcgggtaatattcgtccggcatacggatattccagagaatataacggtcaccggatttcggaataagtttgccgccggggagttgcgtgtcatcatcatagggccatatcgtaataatctcgaactcacgggtggcactgttgaaattcacctcgaaatagtggtcctcaccctgccccagtccggaaaggtcaccgtcctggaacgatacacgtttggtctcgtcgggcagctcgtaatcgttcggatcgaagttcaggctgtcgtccctgaaataatagaccgtgaaagggttgccgtcgtcatctttcacatcttcgctgcgcacactgctgacagccccgatcctgcggggataaatgccgctgaaggcgtcttgctcgtaacggtcatagatgccgtactcctccgtatgtatctcgacatattgcctgccccccggaagcatcaggcggctatgcccgtattttgacggatctatgttccgcgtgctgcctaccgggaacaaccgggtataaaaattgtcggtacccgtcgtgtcgcgttcgattccggtcagtcccttcccgtagcccagcgttatttcctcgccatgctcacaccggcacacgttcacggtctggccttccacccaccattcagcctgcccgccgaccgcttcggctatctctttcagggcttcgttgcagtacttcccctcgtaatcgatgacgataaggtccgtaccgtccacccgccccactttccagtcggtggtgtggttcattccgtcattgatacacttcacgatcatggccacgtgttcacgcggagtcgctgtcagcgtgaacacaggctcggtgttcccgtcggtggtctccagcacaagaaaacgtctcaccaggctctcgataccgtaaaacttcaaatcatatacccactcctggccgctcttctgcttcggggtgtaccgttcggtcagccagtagcgctcaccctcaaagtccacccggtcattcacgtccagggcgatatattcgtaatgcgtgaaagagagtgtcaggacattgtcaccctgcacctccttcacctgggtggagctgtcgcccgcctcgatatcggtccgtctgttgccgttgctgtcatagatggtcagcatgtctgtatcttgtttaaacgtcgtttgaatagggtttgaatcacatttatatgatcgggacaggttcccggaacttcaccttgaacttgccggcgtgcacgccttccttccagagataggtcagaggctggaacttgctgcaatccgtatatttcacacggagagtcagggcaagttggggaaaggaaatctcaagccacccgtcacggcctttcttcaggaaattgatgaactcgaaatacttcttcagccagccggcctgcgttttgccaaacagggcgaaatgaagcgtcacgtcacgggcctcgttcctgggcgtcagcacggaggaatatttctccccgtcctcctcccggatattcacagccgtgtccgttttcgtcttgctcggggtcaggatggcggtcaggttatccatcccgccgcgcttgtcctcaacgaggaacaccccgtatgtactccagatgtcggtaccgttgacaagtaccagaccgcctaatatcttttccatatcatttgcattttactccgtcacgattgattttacgaatctcttcctctattttgccaaggtgcgacgcgctcgtgccggtgttctcctcgatacgggcaagatgcccctcggcggtgttcatcttgtcgatgacgctctccatcttctcatcgatgctcgaccagtgttgcaacccgctggtgaacatgccgtccagttttgtaccctggtcctgtgtcatggctgaaaaaccgccggttttggcgctctggctcgtaccgcccgagttatcgtacccggtggccgcggcaagattgtcacgaagagcgacggcttcctcgacatacttcatgtactcgtcctggagggccttacgctcggcttctgtaaggtcattgtcttccatcgccttgccgaatttctcccaccagcctttcagcttgtcggaatacagctcaccgatcttgtttgacagcatcgcacgcatgaaatactcggatatgtcctccgccgcggctgcggcatcatacttcatatccatcaggttatccacgaaactgctgtacatgctgtcgaaggaaataccggtgagaccttcatacagctggtcggtaagttcctccagcttgcccgcctggtcgatatagtcatccagcttctcggtcagacgacctccatatccgcccttgccggtatcctggatctgcgtccacatgtccacgttactgcgcaacttcttcatctcctccggacttaggttccagatgtcaccgttccagctacgcccgatctgaccgctcaaacggtcaatctgttcctgtgagaaaccgccccagtaataattccagctgtgatgcgaaccgtgataaccggcctgcgacatggccatgtccagatagttcgagttcgtctcctgctggagcctgtaggcatcccggtaggcggccacggactttgtacccttgctcgccttgatctcctccgtcaggtcctcgatagccgtctgcaaggtctcgttgcgctcggtcagccggtcgatggtttcctggacctctttggcattgcttgaagtcgtccaggaggaaaatccgccccaggtcaatgcgtcgaatatcttgcccacaccggaaagcagcgattttccgatagtcacaaaaagatcaccggaaagcacatcgtcaagaataccgctcacggcattgaacaccgcgtcgagcaggccaccgatgaccacactcaaaccatccttgaaaaggtctataatacttacaatccagccgacaacaggcacatcctcaagtgtttcggaaacctttccgaaagcctcgcccagtttgccgtccacttccttggcacctttgccgagtgtgatcaggccattatacgccccgctgatactgccggaggcaatctgctgcaatccgtccctcacattctccatactggtcttcagaccggaggcagtattcgagagggactgccgggcactgtcagccgtttcctgcaaggcgtttatattctcactcgcggcatcggcattagcctgcgccgtttccagggcttgccgggcggactccttctcctgttcggttccggactgttgcgcctcaatgtatgatttctgggcggcaataagtgccgtataggtgtccgcatacaccgcctgtgcctccttcaggtctgaaagggctttctggtaggcagtaacctcggcacccagtttcttgaaactgaccttgccggaaccgcccaaagccctctccatctgctggacggcagagacaagcgcgtcctggctggcatggtcggcatttcggaactcgtcagtgagcatgtattttctggcatccgccaatacaggctttatcatatcggaaaacatcccgccgaattcaccgaagacagtaccccagtcaatacgggctttcagttcctgcacttcgatgccggcaagtttgctgtcacgttcaacaccgagagagagcttctcgctgccggacgtcgtcttttgtatcttttccgcatattcggtcgcgatggcgagtttctgctgctggaaggtgccgtaggcctgcaaatattcctgcatcactccgaactcttcccgataagcttccgctattttcttctgtcggccggactcgttcagctcacgggccttgtctatttcggactgctgatcttccgacagcgaaccggactgccccgctttcgcgttgtcacgtttccaaccggcttcctgcctggctatttcatccttgcgtgcctggtattcattgtctatctggcgcagcttcttctccagcccctcggtcatcatctcaatctccgcctcgtcattcttcctttgcagcccggcgagttcctggcccagcttttcagaaacctgtttgcggcgttgggcttctttctccgccttgtccgccttcttccgttcggcctcggaatccttatcctcaccgggcttgaccttgtcgtactcctttttggcggtatcgacggcatccttcagttctttcgccttcttctcaaactcctcacgggaaaggctgttggacgtttcctgaagaaaggcgttataagccttgagcgcgtcctggtatttctcttttgtcgcagccacccagtcagtgcttgaatccgtgggcaggttacgccggttttgttccgaaaccagtttgttcagctgatacttcagttcgtcacgggaataagttccggtaagattttcgtcaccctgcgtaatctttccgtattccttctcctggacagacatccgggcaagcagggttctacgctgctttatctgctgtacaagggtctcgttactcacaccggtcaggttttcgaaataggcatttacctcgtccttgcggatttgtccgttcaggctcttgcgttttccgtacagattctgaagctctgcctcctcatcccttgaacgtgcggatttccggacatatcgggctctttgccgcccgtagctgtcctggtaatattcggttgccaaccgggtcttgccttcaagttcttttatcctgtcatccacacgtttcaattcattggcgggattggatatggactcaccggcttccaatcgggctatctcttccttgattttcttgatattcttcagtttctcatactcggtgtcgtatttggagaatatatccggatatttctgttccagcttgtttagcgcctcacgccgggcatccgtggacacggcttcatccccggcaatggaacacagttcctctattttgcgcctgtgctcttcctcggcctctatggttttctgcttctgctgctgatacctttcctcggattcctgcaaacgttcggtttccgtcttcatggagatcagtgccacggcaacaccggcaagcagggtcgcaaccagcacatagggattggaaagcatggtccggttgagcattttctgcgctttctcaaccagcaggagccagttgtaatgcaacgcctccgcagccaccgcccagcctttcacggccgtgactgtcatgacggcggtccggtacacaccatacgtgccgacaagcccgagcaggatacggccgaaacgttcgtaatgctccaccatgtaggaaacaccggaaagcgtggtgttgatgacaccttccgactgctgcccgatttcattgaacatcattgaaacggcatcctctatattggagatctgtccggttatcgttttggattgtgcctccatcagaccaccgaattttccgccctcgtccgtcaggctctctatgaccttctgcacttcgggaaaaccgaccttgccttcctccacaagctccttcaccttgctttcagccacgccgaactgcttggccagttcggcgatcatagggatgccccggccggtgaactggttcaggtcctgtgtataaagccgtccctgggacatggtggtgccgtaaagatagaccagatcgttcaaagggatggaaagtccggcagcgatgtcacccaagcggatcagcgtctcgttcactttctccgctccaaacccgtaggcaagaagctgcttggcaccctgcgcgacatcctccaggccgaaaggagtggtcgcggccgtatgtaccaactgctgcatcagggtgtcggccttctccgcactgccgagcatggtctgaaacgacacctccagctgctggaactcgccgcgtaccttggtgatgttcgacaccagctccttgatagtaaaggcggccgccagcttgccgacggtgttgttcaacagggaaccgctcctgtcaagttcccggatctgtctgttggcggacgatgcctgctgggacatccgctcgatcttgcccacggccttgtcaagacgggcgctcaaatggtccaccataaggaattctatttgtaccggtttcatctattttagcttgctttgaaaaaatcctactattccatccgcttcatcctcggcgctccgctcatccgcaggaccggaagatccggacttgtcacggacataccggggagcgtcactaagcatcatgatcagggtctggtaattcaccttgttcagtatatagtccacgctccagccggtggcactggcaatctgccacacaaaaccgaaagggctatgggagccttcataacggctctttaactccccttctttctttggctcagtctcaagctcatcggattcgtccgctcggctgatctgataataggtataaaagggtcggtacccatcaggctgacaaaacgcttgatcgcacccaccagataacgctgttccatgaagttccttatgagccatgccaccgggcgcaaaagcacgcggcggctgaaagggccacgacaaagggtataggccaccatacggctcaccgccttgccgtgagaggccagaaactgcatttcctcctccttgctgaacccccacatctcctcactggtgatccccatcgacaaatatgtccgggcaaaaagaatctgaccggacatataaggccgcctcatggtcacgcgcagctccagcggggatttcctgaaagggatatgaaacgctttcagcgggacgctcacaccgatatccagcagcgcgtccgcaccctcacgctggatctgcttgatgacagcttcgtccatacgctactcctcggccaggttagtggaagcagcggcggcagattcagcaggaggcagtttatactgtttccactcttccgggatagaatccgtattgaatacgccatggggctgggagccgtcttccggcatggccacttccagcgtgcattcgattttcgccgtttctgtcagggtcagcttgccgccgagattggaaagtagcgtgccattgggaatcaggatgctctgccccgaaacaagggctatttcccacggaccggtcagcaacacggctgccgtcggggccgtccaaccaatcggggttttcttttccgagtcctcttccttgtagtgcatggtaccacccagcaagctatgcaggttttcgtagttcagctggataacgttgaacgtgggggcgatgctgccattcgactggggaatgataagcaccggggttcccggcacctgctccgcctcgattttggcggattcgggtttctgcccgcccatgtcaaacgaattcttctctatgtaacccaccacaaagtccttgtatttcacggcaccgacgccgtacatgaaattcttattcattgtttcttgattttgaaagttaatactatgccggcaacacatccggttataaaagcggccagcgctattttaacgggactaaagcgacgttcaaattccgtttcaactgtgaatgagtcctcatgtgtctcattacggatacgggtcagttcctcctcataacacagtaccagccgctggaggctgtcgcaggatgcctccgctatgatattgccggccgcatcgctcttcaccgtcaggcccgcctgcccgttcctggaatggtaggacgaaccggagggaagtttacggaggctgtccggagggatcgtcaggctcaccgccgatttcggaatccccgccatcaacaacccccgcctcacgtttgacacgttgtcggcgcttgacgacaggctgctgttccggttcacctccgtcctgctctttcgagtactcgcgcatcccgtaaagaacaggacaatcatcatgatgcctgcaactgttggcagtatcaatggctttccggaggcgtgccatttcacgccgggtcgcctgcaaagctttcctgttttcattcagttcctcttttaagggttctacaatattctcgatcaggatacgggtggcatgttcggtattgtcaatccgtaccgtctcggcttcggcggtagccttctccgctttcgccctcgcttccctgaccgttgatttcagggtgatgatggctattatcgtggctaccagaccaccgcccagcaccagattcatgacagcactgaagtccatacgcacactggtctttcaggtcaaagcctatttaccggcatccttacccgcaaacagtccgatgagccactggacaaatcccgtatcggcaacaccattggacacaagggacgcaccgaacccgtaacacaacgcgatataccacgtggcatcagcgacaaagcccgcatccagccaccataaaagcatggcggccacaatgcccacacaccagctgacaatctgtgtcgccaagccctgcatttttggaaacagagccttgatcccttccgtgagcaacaccacgccaccgacaaaaccggcaaaggtggtgatcatcgcgctataatcgacttccggtactgtaccggtctgggcaaaagttgctgacacgaatccgagtatcagcacaaagaataaaagaaatcttttcatgttgttgttgatttattgagttatacctatttgtttaagccatctctgtacatcaaaactggggcaggctttggccgccagttcattgtgaccgacgattctcacatcgggaaaacgacgatggaaatccttcacgtacttctcaagcgcctttttctgccaggaggtacgggtgtccgcaggcgttttaccatcctttgcacacccgccggcatagacgatatggcggctcacggaattgtaaccggccacgccgttggtcacttcccacgggtccacattcgcgtcctcgttattgttcaccaggcgttccactccgccgttcagatggaacaggtcggtatatccgacctgcttccagccgcggccgccctttgagacggggttcgtatgccaggcgcgaatctccgcaccgcttacctcacgcccttcaggagtggccgtgcaatggatgacaagatacttcagctttcccatcactcaccgccttcctcttcatcaacggccgcctgggacagtgctatctccaccttcttctccggatcggcgtccaggcccagtacaagtgtgccggataccgccttgccgctactgttcacaccggcggtgaccgtcagagagccatcggtaccgactgccgtgaaaccggcaggaatggaaaccacgctgtaatcaccggaggcagtgaccttcacctccttgctctcaccggcggccttgaaagaaagagcgtccggatcggcagaaatgctgcgttccaccgccttgaacaccggagtctcacgggtgtcaagcaccacgaactcctcgccgaaggcgatttccgtgtcggccttcataagcagcttgaagaagtacagctcgctggagttcatccacttgtcaatctggatcacctcctcatcgtcctggaggttcacaccggcaaaaaggttgccgtcagcgctcatcgagcagagcgtggctacgataaggccatcaggccaggaattcagcgtctcgatggtgatacccttgtaacgcttcttgttgatgtccgtctcgctcgtgttcttgtactcgcgttcggtcagctcgtcatcgtacttgtcgaagtcgtcaatactcatcaggatacgcaggttcggattctcacgcagggcttttggaatagccttgcggacagccttcaacttgccgatcatggaagtatcggaaggagccggaaccacgatcacatccggatctttagccgcctgggtcaggataccgttgaaaaggtggtcgtcgtccgaaccgaactcgccgttcaggtaatgccagcccagctcgaacttcacactcttgctaagttcatccagaagcgtgttctgcgcttcggggggaagttcggcaaacacgaggttgcccttcggctgccacttgcgccaaacatgctcgaaggcacggggattgaaagtcgtgaacgccatgaagtcctccggatccagtgatttctccgagtaattgaaattgcctttcgagtcttccaaagtcgggttctccttacgcttctggagcatcttgccggtcttgatacgcggcaggctgatttttttctccacaccggggatcaccatgatcagacctttttctacaaggtcattcccggtggtggccaggaccagtattttctccagtacctcgccgttgtaattcgtgtttcttactactattgccatggcaaatgtttttatttatggttcaacttgtccttaatctcgctcatgcgcttgttccaggggctttcacccgtcggattcacacgaaggtcggtcatgacactacgtttgggggaaagcttctccaatgccttttccccgttctcccggtcttttgccagaaggttctcatagatggggcgggtggcggcatcgatacggccgtcctgttccgcatcatcaagcagtttcttacgcgcggcagcgtcatccgcatccgccttgtcctggaacaccttcagttcgcccttcaggcgggtgacctcggcatcaagggccgggactttgccagcctccgtttccagcagtccgatttcacgcaggaaatcgtcatccgtcgcacagttcttgaaccgcggacgtctcttgagttcgtctaaattcatgctattctcgttttgtggcttgtgcagccggttattgaatatttgaaatacttgttcgggggtactgtcctccggtaccgggtcagcgtcataaataccgtcgataagccccagcgccagcgcctcgtcggcacgcagccagtgatccttgccgtcaaaatacatcgcgcggatttcctccttgtccttgcccatacgggtggcatacatctcgcaaagggtatcctcaagcgcctcgatctcacggatgcagtccttcatctcatccttgttgccgtaacagccgccctggacactgtgaagcatcagacgggcataacggctcatctgcacgggcttgccgcaaagggcgatgacggaggccatgctggcggcgatgccgtccacgtagatggtaatgtcggccttgctgttcttcaaggcattgaaaatggcgatgcccgaataaacctcgccgccgttgctgttgatacgcacgtccaccttcccggtcagggcttccgcttccagaagttcacgggcaatatcaccgctgcgcacgttatcatcgtactcaccgatgtcaccgtaaagaaggatgcaacaggcatcggttccgggtatcatattgaaaaatctactcatgtcactatcgttttggcaggtccttccctgcaaagtttacggtgcgaaattagggggattaaaagcctttttcaaaccgcgttttcatcatggagactttaaaggattgccatgacgctttaaaatgtcatcatgcggagcgcgttttttttcgctccttttccttatcaattttgcacgtaaaaaaggaggtaatatggccgaacttacaaacgagcagaaaaaggcatgggcgaaaacgctctacacccgcgaaacgctcacgcaggcggaaatagccgagcgtgtgggggtttcacgggtgactgtgaacaactggataggcaaaggaaactgggagcagctgaaggcttccataaccatcacacgggaggagcagctgaagaacctgtaccggcagctggcggaactcaacaacgccatcatgggaaagccggaaggggaacggttcccgaacgccgcggaagcggacaccatttccaaactgtcgaacgccatcaagaaactggaaacagaagtggggctggcggacatcatctccgtgttctccgacctgctcaaatgggtgcggacctacgattccacgcaggcgaaggagatcaccccgcttctggacgcgtttgtcaaatcaaaattatcctgacatggcaaagaaaagactcacaccccaggacaggatcgcactggacaactggaacgagctggtggcatccgtgcgcgaacattcggacatcaaccccacggacacggaaacggaaatcaggcagaggcgggaaagactggagaagaacgacgaggagtggttcaaatactacttcgccatgtattgcacctgcgagtccgccgccttccacaaaaaagccaccgggcggctgatgaggaacaaccgctggtacgaggtaagggcctggtcacgcgagctggcgaaatccgcacgctccatgatggagatatccaaactggcactgacaaaaaagatacgcaacgtgctgctgatctccaactcggcagacaatgcggaaaggctactgctgccgttcatggcgaacttcgaggagaaccagcggatcatacaggactacggacagcagaaaaaaccgggagcgtgggaaaccggggagttcacctgcatgtccggatgctccttccgcgccatcggagccgggcagtcaccgcgcggtacgcgtaacaagaacttccggccggacttcattctggtggacgatatagacaccgacgaggagtgccggaatccggaacggatcaaaaccaaatggaaatggctggaggaggcgctgataccgaccatgtccgtatcgggaaactaccgcatcctgttcaacgggaacatcatcgcgccggactgctgcatcaaaagggccatcgaaaaggcaaccgaactgaaggcgaaaggaatcgggcacgtggatatcatcaacatccggggaaaggacgggctgtccgtatggcccgaaaagaactccgaggaggatatagacctcttcctctcactggtcagcgcggcggcggcacagaaagagttcttcaacaacccggtggtggacggcggcgtgttcgcggaaatcacctacgggaaagtgccggcactttccaagttcaagttcctggtgatatacggggaccccgcaccgggagagaacaagacgaaaaaaagttccaccaaaacggtgtgcctgctcgggaaactcgcgggaaggctttatctgataaaaacgttcctggacagggggctgaacgcggaatttgtagagtggtacatcaagctgctggagttcgtgggcgggaaaaccaccgtatactgttacatggagaacaacaaattacaggatccttttttccagcaggtattccagcccatcgtgcggcggatacgcagggaaaggaaaatatcactgtacatcgccggggacgaggagaagaagaccgacaaggccacacgtatcgaggcgaacctggaaccgctcaaccgggaggggaacctggtactcaacgaggccgaaaaggacaacccgcacatgaaacggatggcggaacagttcaagctgttcaacctgcaactgacctatccggcagacggacccgactgcgtggaggggggaaacagaattatagaccgcaaggccagacagtcggaaaagcccgtcattgtcacaaggaaaagcacgcggtcacaaaacaagtacagagtgtaaacttcaatacctatcattatgagcaaatttatcgaactttcagactacgacgcgagcatacaccgcgagattctggacgcactgacaagggaggacgacgccgtcgtggagatatgcgaggaccgcgccgtcgccgagatgcgctgctacctttccagacgttacgactgtgacaaaatattcacggcaaccggtgacaaacgcaaccagcttgtcctgatgatggccatcgacatagccgtgtaccacatcttctgcatacataacccgaggaacctgtcaccgctgcggaaggaacgccacgaaagggcggtcgaatggctgaaagccgtggcggccgaggagatatcggtggacggcctgcccctgctgtccgaagagacgagggcggcaaaatcaaatttccttatcaaaagcaaccgtaaacgtgtaaaccattggtaatatgaacaaaagaaagaaaggggccggaaagataacccaaagcgggaacctgccgaggcccgggcagaaaggacccgcaaccatcatactgacacagcccagaaggttcggtatagacatagcggactacatgctcgcggtaagggctttcgagaatgtggactactccagacgcttcaggctgtacgacctgttcagcgacatactcatggacacgcacctgacaagtgtcatagagaaacggaagaatgccgcactggcatcttccatagaattccgcaggaacgggaagccggacgagaaggtgaacaagcagatcaggtccccatggttccggaagttcataggggacatcctggacgccaaattctgggggttctcactcgtgcagttctaccgcaagggggaatgggtgaactacgacctgataccgcgcaaacacgtcgatcccgtgcgcaggctcatactgcggcaccagacggacaccaccgggacgtcctgggacgagtaccccgacctgttgttcatcggttcacccgacgatcccggactgctggtgaaagcagccatctgggtgatatacaaacgtaacgacgtggcggactgggcacagttcgcggaagtgttcggagcgcccatcagggagtacacgtatcccacggatgacgacgaggcacggcagagggcgctggacgacgcggacagcaccggaagcctgtcggttttcgtgcacgcggaggatacggtgctcaagctcgtggaagccgcgaacaagacagggagcgcggacctctacgacaagctctgcgagcgctgcaacaacgaaatctcaaagctgttcctcggaaacacgctcaccaccgaagcctccgacaagggcacacaggcactgggaaccgtacacaaggacgtggaggagaaagtgacgctctccgacaggcaggacatcctcgacgtgctcaactatgacatggccgacatattcgcaatgctcggaatagacaccacaggcggggagttctgctatccggaaaagaagcttatcgaaccggagaaaaagatgtccatcctcacacagctgcgtacgaacttcaacctgccggtaggtgacgactacctctacgaggaattcgggatcgagaaaccggcaaactatgacgagctgaagaaacgccaggaggagaaagcggcggaaatcgaggcggcgaaggcccgagagaccgaaaaggcggaagaggatgaaccggatccggaagaagaaccggaactggaaaagcacggtaaaggaacacccaaagaaaagaaaaatgcccttaaaaacgcatacaactggctgaaacgttttttcgggaaagccccggggagagacggggcagctttagaatggtgataaacgacctctacagaatggaggacaaacaggtggaaactttattctcgttcgatgaagaggtactgaagaaagccctgaagaacatatacagcaaagatttccatcccatgaccgacatcgaggagaacctgttcgaggccacgtggaaaacgatgaacaaagccaccgacaaggggtttgggacacggaaaaccgatgatccggattatgacttctaccgtgaaatccgaatgaacaacgccgtgttcgcagctttcaaggtacacagggcacagaacgacatggcagcgctgctgctggacaaaaacggaagtttaaagccgtttgaacagtgggtgaaggaagccatgcccatagccgaccaccagatgatccattggctgcgtacagaatacgacacggccgtcatacgggcacaccaggccgcggactggagacagttcgaaagggaaaaggacgtattgccgaatctcaaatggatgccgtccacatccatacatccgggagccgaccacaggattttctgggggaccatacgtccgatagatgatccgttctggaacgagcacaagcccggggacagatggaactgcaagtgcacgctctcatcaacggatgaagcgccgacagcggtaccggacgaaaacgggcagaacaaggcacatgacggtctggaaaacaatccgggaaaagacggcaaactgttttcagacaaacacccctacgttactgaagcgcatccgggagcaaaaaaagccgtggacgcactgaccaggcgcatcaacgaaatgatagccgaaatgccggacaacctgacgctggaggaaaaaaccgacatcgcccgcaacaatctcaagatagaaaaggcactcggcgttaccaaaggcaagccgatgacatacgaacaggcgaacaagggaaaggagaacccgaaattcggaaaagaggaaggataccgcgtgaattgccagacctgcaccgtgacacacatgctcagaaggttggggtttgacatcgaggcaaaacccaacatcagacaaagcgcatacaatgaaatggcaaaacaaggtatcacatgggaagaacgtttcctgaaccgggacggaacaaagccggattatgactatacctataaatggcaggtcagaaagggatatcaagtaatgaatgcaaaccggctgaaggaatacttcagggaaaaattcagagaggatggaatatacgagatatattgtgcctggaaaggcggctccgcacacgtgttctgcgcagaggtgactgaaggaaagacaaggttcttcgacccgcaaaccggaaaggatgatgcaagcaattacatacagagcatgaaagcgggccgtgtgggagtgataagaatagacaacaaactggtaaatcccaaaatcatgggactattcatcaccaaataaacgggaagaaagtgccagcccctcctcaccgtccaccagacggcaggactggccgtcgaacagaataaaggcgggaagaccgacaggcaactcaaaaccatccccgtcaacacagcccacggaatagatgcttccttcaggggaactggctgataagacaacggagttgtaaccgctactgtttgctaattccgacacttgtttaggtatttccataacgcaaaaaggcacataaaaaacgccttgctgcaaaagtataaaattattttttaattcagtcattcatggacataaaagaatattcaaaactgataaaagccaaacggaaagaactggatgggctaatgaaacggaaaatgccggttatcgccggacgaatggcaaaagaccatttccaggacaacttccgccgggaaggtttcgtaaacggaggattacacccgtggccgaaagcgaaaaggctgtcctcgggacggaccgatgcggcagggagctacgggacgctgctctccggaaggaaccatctcttcagctccgtcaaatacatgccgggagaataccgagtgagggtggcaaacgaactcgtctatgcgccggtcaataactggggaggagaagttcatccgactgttacgccccaaatgcggcgttttgcatgggcgaagtattaccaggcttcaggcaaggctaaaaaagccgccacgggcaaaagaaaaggcaaaaagaagggttctgccgcaaacaatgaaccgcaggaaaatcaggaagcgctgaaatggaaaaggctggcgctgaccaaaaagaaaaagctccggataaaaataccgcaacgccagtttatcggggaaagccgggaactgtccgaaaagatagaccgtaaaatggagaatgaaatcagaaatattttaaacttataacaacatggaagaaatttttatcgcgatcatggaacgcatcgccgaaaagatgcctgaactgtcatacattgacgaggactacggacagcttgaagccggggcggaggaggaccactatccggtaaccttcccctgcgtgcttgtcgggaacgccgaatcggactggaatgacctcggttacggggtacagaaaagcgagtcactcatcaccatacgactggccattgactgctacgatgacacccactacacctccggaacctatgacaaggtaagggaacggcagctgaaggccaaagagctgtacaaagccttgcaggagttccagtgcacggaagagaccagcccgctggtcagggtaaagagccgggactattcgctgccgggaaacatcaaggtgtacgagacggtttattccttcacgctgcatgacgagtcggccatgcagtaaggggaaggttcattcccccgtgaacagggaaagctggatggctgtcaggcggggtttcttaacctttgggacgggcttcacctccaagtccttcagttcccgacacttgcgccggataatggacatgatccgctcctcggaaatgaaaaactcctgccgggacaacactttcagggcatcatcaaaacgcaggcgctgcacctccgtccagtaatagtaacggcggcacaaggcttcatcacggagttctatcaggtttttatctcgtcctttggccataagttcaggtatatgctgcaaaattaggcatttaaccggggatgttaataaaaaaacgccgcatcgtgtatgaatgcggcgtttttctgtttagagtgtgaacaaaatcacatggtcatcagttcggtgtcatcctcacccgggacaaacggctcgatgcgggtgatcaccttgctctgtaccttcacccgtccgctgccattacagaccggacattttgcggataaaggagctcctccctggtccaggtaaaagatacgtcccttgccttcacaacgcttgcaggccatgacgtgcggcgcgatgttcttcgtcttttccataactacaatcggcagaatgaaggctcgatacggcgccagacaccgttctcgtcacgtttatgaaaatagtagttcaccgcggtcttgtacaccacgttgctctcacggaagaggtccatgatctccgtgtattcgctgtcgaaacggtcctccagctcatacagcttgctcaccgacttgtagtccagatcaccctggcggttacgctcgatcatagtcataccgagctggtacatcggatcatcggtaccgagttcccggctcatggcgtaacgcttcaggtaatccaccagacgctcggcggcgaggttggcacgctcgtcgaagctcttcaccttgttactcctcacttccagcttcatgtcaccgtccacgatggtgaaactcgcctggtcatccttgcgaagttgcccatagtcacgcatcaggtcacggaaagaggcggcttccttctctacccagtcacggaaggccttcacgtcatccacaactggaaacagcctgttcttcacttcaagcatgaactgcgcacgaagcccttcgtaggcatcgcgacgattgcgcttgttttccttctcttcctgctggagctgtttcaaaagctccctcctgtcctgggcggacaggctttttaattgttctttcaagtccataactgaaaaattaaatggttgctattgttgtttattctcacgtttacggcggatggcacgcagcttcacctgcaacgtgtccagtgcctcacagtcaagttcacggaactccttgccggcgatacggctgtcccggcagaaggcgttcacccggtcccagtcggccgtatcgatgcccagcaactgcatctggtgaagcaccgaggaacgcttctggcggagaatcttccggagctgttcctggtaagtgggcggtaccagcttctgcatggcggccacggcggcgctgtattccttcagcgtcatctcgcgcaggctcgtggtgcggccgtccgtgtactgggaaacgatgctttccttcagtgcctcacgatccgatgtcggaaggcggttcaaaaggctgtaaaacgccgcataattctcgggtttatttaactgcttgcggctgttgatgtctatctgcatggctatactgtttttttgtttattttaaggtcattgatttccttaatcactctctttactctgatagtacacaaataatcaagaagatgctctttttcatttttttgtacacttatactggtcgaaaaattcaagtatgcccattctattcagattttcattaactcaaactattcataccacatcagcacaactctatgatttcacccacggcagagcgtagaagagtacgcaaaaccgaagggtttccgctatcatagatgacttccacacaacactcatggcgtgcgttacgtgacacaaccagctcgcaagtcatattctcacagagccatttttccactactttacggacaccaactgcggtgaccacaattaccatttttttactcataatattgaccgtgctgtatgttattcaactcttatcctcccggtgtactggtttccccgaaacttcatccccttggtgaagccgcccggatatcccagttccttgcttctcgcgtttgccagcaacaaatgttcccggctaagggaggctacaaaacttttgtccttttccagtcccatctctcgggccttccgggtgacgctgcgttcggaaacaccgagcatttcagccagctcccggttgagggtattgtgatagtggcgccgcatgatggaaagcatattaccgttccaaaagatacgggtggaatatcccttatgctcgacgagccgtcccagtgtccggtgcatgaaagtaccgtcagcaaccttccggtgcttgcggtactgttcacgcttgtacgccagcacacattcatgacaccaggaactccgtcccccattcttcaacggatagaactcacgcatccacaactttcggccgcaatgcggacagacacgtttacgtttctgcttgttgttattttcactcatagctgtttatgctacattcatcagttcatattcaaattttcaccgaacggaatagtattaatgtcagtctttctcgtgtaggcctgcatgagtgccatggaaagcagcatataaacacggctgtcggccttgacagtccccgaaatggcgccgacaacatactcacccttgccggtgatgatcgagccggctatctgctcaagcccgtccggatggtcctcactggccgcaacgctcataaaggcactaagattattttccttacaaaagttatccacgtattggcagagttcctttactgcctctttctgtttttctgtaatcatttcagttaaattttaatggttaataattatatgttgaaatagcgaaatctctttttgagcactgctcgaacatcgtctcctcccagtccggctcgttctcctccggcaggtcgttctccccgagttctatttcttttcggtaaatgaggtaccgtgcctccagaaagaagaggaccacgcggcgcaggaactcacgggcggaggagatgccatgcctctccatgaaggcggcgatacgctccgggccgatggtgttcgtgcggatactcaccagacactgccggcggaagtccttcagcgtgctgccctttatcccgagcacgctgtcagcgatacgaccgaggttctccgggatatggtaaccggaaccgtcatcatccgtccccaccagcagttcggcggcggccgtcagcataccctccacgctcatgcgctgggcggcggccgtctccttcaggaacacgtactggtagttgctcacgtaggtatgtatgaggtagccttccgggcggcggaacacctcttcggaggcaagctccatcgaaaggttgttcaacgtcacaccggcaccgcaacagaaggcgcacaccaggcggacggcaagacgctggcggttgccccaaccgccggcgatgatggcacgctgcaggctgccggcaacggccggatccatctcgaagaacagcaccgacttctcctgacggcggaagaagaacgacatgtccggaatacggtccatgcagaggaggatgcgccgggtggccgtggagaccctgccaccatccgtcatgcggatgtaggacttcaccaggtggttcatcactaccgtcatgtcggaaaaatgatagtcggcaaccttcccgcggaacagttcatgaagcagaacgggcagcttcacaacgtagttgtaatactcctttctcatggctcacttgcttgaaggtttccagtccactgttataatcgcatccagctcaccgctgccgccacacaccgggcaggacacatgcacgtcctcgcggctgccctcttccgttccccagaaccagccgttgcccttgcagtaaccacacttgtggccggtactgacgaagttctcacggttaggccccttacacatataggcgggaggacaaatctccagctgtttctttatcccgctcatgcctggcctcctttctgtttcggtcccgccacattccaatagtcataggcgcccttctcccagattgtgtattcaccagtggccccctgataacgtcccttactgaaggcgacgtagccctctacccatatcttcaggtcggcatcatacatcacgctcgtggccgcatcacctttaggattcttgccgcgggcatggctgatgaaaacaaacagcttgtccggaaactcctccttcagctggatatagtcacgatacgtcatctgtgtgtattggaagctgtcaatgatcacgatgttgaaactcttatgacgccggagcctgatcttcaaggtggggatgtcctccttgatgaacgccaaatggcggcttacctcggccataccaaagcgccgcaggttattttggactgtcagagaagttccttcctccagggagttgaacgccacacggtcatacttgcaaagttccttgcagagctgcatcacgaaagaggtcttgccgttaccactgttgccccacacgaaccagcagccccggacttccggagtgtcgaaggcatccttccatttcccctcaaaagggaatacgtcatacttcttgttcagaatgtccctgacattcaaggcacgtctcatgcccgcttttttattatcctttttctcttcttccatggtcagaacagttttagttgtcggatattgtctatttgatcaagcacggcctgccgtgcggcaccccgcagtttctcgtggcagagcatcctgccgagtgcccacagaagggcattctcacgggtggagaactgtccccatttacgtcccgggttgaaaccgccaccggaaccgcccacctccatgtgaacgccggcaacccaccagccgtcctgctgtcccacaagggcgtccaggtagtcgcgaccattccggtaaacggtcaccgtctcgtattccctcaagactgggtaatcgctccagggagcgggaagctgctcgcgaccgtcgatctttaagtattcaaatttgttttccatatccttaaaattacgtttgaacggtatttgaacgggagtcattcccccgtcatgcgtttcaccttgtgaatggacttcctcacacgccgcaaatcaaagtcacatgtcgaagcctcctttatcaccttatcgatgtctttcttgtcagtcacaccgttggcggaacagatcgcgaacacgtcgttcacgtctgtaggctccagctcataaaatttccgtccgatacggctgtagaactccttgtagccgggcttctggtatcgcagaccattgctgatgcgtttggcaatataatcggtactcaaaaacacgacgccgcatttctcctccagcttgttgtacaggctgatgaagtagtggaacaccggttcggtcagcttgtccgcctcgtcgaacaccagcaggggcgcgtccatctggataatgtcatccaatataagcccccacacctcacggatattatacccttcggtccggattccgaccgtacgggcgatctcgcggacaaagtcacctttcttcatgtcctcagagcagaggatatagaaaacctccttatgctcctggaggtaaacacgggcggtggtactcttgccacaaccggcctcgccggtcacccaggtaacattgcgccagcgttgcgcgtcagagagtacagccgtgatctcctggtaagcacccgtctccacgatctgccagccggtagcgcttacaccaccgacctgcgaggcgacattacggaacatctcgtcgctgatattctcataacggccgttcaggatattgctcacagtacccacactgactcccttcagactacccgcggccttcgtctggctcggatacttcgccacgtaagcccggaggctctcactgatggcgttcttctctttcattgtaatttccataatcaatattttttatcttgttataaatctgttccttataatttcccgaccaccttgcggatgctcacttccttcttctcaaagctgtcccatgtcacgttgctgatgactttcatgtcacggcctatggaaggacggggcggctggctgtattttctcgtgcggcggtcaatctggcgttgcgcctcctttccgagacctttcaggtcaggagtacgcaaaccgttctgttccggtgcgacaccatgctcatactcgatatctttggcgacgacctgacggtttatacgctcattgacgacggcctcctgctgggtgcggatgaaacgtttttcggcttccgtctgctcctgctgggcacggtggatcatcagcgggaacgaggccacacactcgaaacgcatcgcaccgcccttgtccttgtaaagcaaccgtacgctgctcatgtcatagggatcgtactggacatagaacttcttgtaggtattacgccggcgccattccaggtcaggctcaccgggagcggagaaaacctcgtaagggtatttctttccctgtaccgtgatctcgataccgctggcggtgaacagcgacggtttatcggttgtgtaccagaacatctccaccatatcaggaacgctgaccggatcggtgccctcgttcacgctggtattgtacatctcaatacgggggatgccagtggccgggtgcttcattgagttccactgctcacgggcggcggcatactgttccttcagttcctccaatgtgggaagggagtcgatgttcgcgttgatgaattccagattcggacggcttgtttctctctttgccgtaatattctgcccggtgaaaccgaaacgtttcttcaatacctggctctggaagcggtagaaaatgttctcaatcgtcttagattcgccattatacggagctgtcgggcggtggatacggctgatcttcgagaaaagacccagcgccgcgttcttcttatgaccgccctggttgtcgcacacgatctcgtagggtttgtgccggctcgtttggatagccatgcggaaagcatggtactgggcgatatagtcctcattatcgctgatgtaatagccaagaagcacttcgctgtaagcgtccaccacctcgtacacgcttgtagtgcacttgttcccgttctcatcacgatagtagaggttcagcttcgtgccgtcgccataccagaggctgtcacggcggcccggaaggatggtgcggtgtttgcggtcataacgctggtgcgccttcatttccccataaacggcatcgtaccacagaggttcgacacgcgggctgctgaaccattcgcggaggctgcggggactcttcaggggcttccagccacgttccggagcgacacggttgtactcctcgaagatctccatatcagtataaaccggaacacggctgcgtttcaatgcaacaaggtaacgcccgccgtcctcctcgatcttcagcgtgttgctgttgccgtacttgccgctcacaagcacaccgtagttgtcgggacggaacttgcttatcagggctttcaaccggcccacactgcccgggaggctgtgcccgtacaccggacgccactcctcactcgtgacaagcagaagctcccaaaggttacggcggaaaccggtcagcttgttattggatgaactcaagcgtttgaactcttccatcagcgcgttcagcaccgaagcgttccaggtgtattccttcttcacatcctcgggaagggcgaccagctcaccgttcttgtcgtaacggtactcctcaaaaaagcgctcggccttctcgtctttcttcactatgttacggatcatttcttctcgcatctgtttctcgggctcgccatggcgctcaacccaacgtttcttgtatttctcgggaagggaagaataggaatacagggctacattgccctcgccaccgccacggttgatactttcgatgttaccgcgacggacattttggtataaagttatatacttcatcaccggattatctcctgaagtaagctcttcacaggttacacacagtatattattatagtattccattttccgttctgttatcagtcctccaaatcattcaaagggacatgcctcttcaacagccgtactgaagccccaaagttcagtacaacaaaaagcgcccaaagcaaattgtcttcactcacagaaaatatcagacagaaattcagacagaagtaaagtacacaaaggcgctgcttccagttcaagtgtataaaccagcgcagctggtcaccgaacaatgccatcaactcacttttcatcgctttccttcttttcagggttaccacctaccttggttccaccgcgctcgatggcgagcttgcggatggaacgggccaacttgctgttcttgcggaatgcaagggagtgggagaccatttcccgggaacaacccagcaaaccggctattttacccacctcactgtattctaccactattcgttctttcataattcgctgataagttaaattattgtagcgggcagtcgcggactcgaaccacggaccatggcctctcccttgcgggagtttggcgtgttctaccaactgaactaactgccccggaaatctatcggagttcttgtatggcatcctccggaacacatatcacagtccaaacctggccatctttcatataatcgacattatattcacgaccgaaagtacaaatgttatagtcccagtcgcggattacaccatcaatgacttcaccgttcctcttggtgattctcacactttgtccctttttaaattttgcttccattatatcttcgttttaagtatatcaatatcaattacatccaacacgttagatgttcttaggctattcacgataagggtggctaatactatactgttttctgccatccacctctttgcttgcctgacagccacttccttgctgtacccatccggaataaaagcccccaggtcattataactccgatctgtcaattcaaaataataccgtttcataaccttctatttttcttctttttatatttctcattgtcacctcaagccttttttgtagctttggggcggtgttcacactttgaacacgtggcaaatataaatcatctttcgcaaattgcaaaacaatctgcgaaataatttcgcaaaatataaaacaatgaataaaaaagaaagattagaggctattataaagcattacagtgacggaaagccttctgtttttgcaaagttaataggggttgctccctcaactataagctcgtggctgtcgcgagacacacttgactacgatcttctttttgcaaaatgcgaaaatctgtcctcagaatggcttttgactggtaggggagagatgattaacatacaaactgccacttttaataatacaactaccctgccacaaaaagaaagtacgggaatagaagacaaattactagcaattatagcagataaagatgccactatccgagagatggcagaggaaataggtgcacttaagcaaacaatcgtgcaacttaaacaggacaatttggggcgtgtttcaggtgcggagagttcaacacttgcaggcgccgggtaaaatgcgttatatggggtgaaaggggtaaaaagcaacaaaacactgatttttagagatatgaattaaaatataggggagtaaataaatattatcaatgtattatttaccccctcaaatagtttaaaaacaagcaaaaacaagtcctatctatattatatagatagacaaatcgctaaaaaataatccgaaaatgtaaacccaagtgtaaaccctattaaaacgtttcgtttttgtaatggagaaaatgtaaacccaagttgtaaacccaagtgtaaaccctttcaatttttccgactgttcaaaccgttcaaagtaagtagcagcctcccattgatgtactattaccgacacgaatacaaaaaaagccgcaaaaagcggctttatagacgttctaaggctgtttcagccctttctggtgcatgttatcaagcgagactgaataatcattgcacgtttcgtgtatttggcaatgtcatcaaccagtccagcatgtaaaagactattcttggtgatcccgacctgttgctccgttagagtttcaaaaatggccgatatactaccaaaatagatgttctttttctcaaaaatcaaatgtacatggataactttactcataatatacggtatttatttcattgcaaatataccaaatatcatctatatggaataatttagataaaataaaaaagggaagtgcgtcaggcactcccccactccacttgcataaaccgatccgtttgactatctttgtatatgagagcgatctggaaaggttcatggagaataaccgatgaacaaacccgaaatctcccctatcccaccttcaatgtaaagcatttcatttgaacggcgttcaaacgaggctaaaatgtaagcccaatgtaaagcgatgtaaacgtttcgtttttccaagtcactctcccctacttcatcataacgctttgacagccaaagcaatcagtcattttcaggccgaccacatattgacacgtttcgtttttccccccttaaataagccaagagctatcagacctttcgcttgattgacacgataccctgtatcacgtatataaggatatgcgctatttgcctcgtcagcagccagaatcttattattactataagtgaaattaccgcgtacagtcagactgacattgcctatatcctgtttgaaagccacatttccatcaaaaccggtagaacgtaccttacctacattcgcactaggtgtaagataactcaaacctaaagttcctggcaaactttgacgctgcataaagattccatcacgtgtttcatgaaaataatctacagtaccagtaaacctgtcatcccataacgagaagtcaacacctatatcatgcttagtagcaatctcccatgtcacaccagaagaagatatctgcttataaatctgtccattatccacattaggagtattgtaatctccccaattataaggatttctactttcaaaaagctccagataagggaaacgagttccaatattgtcactacctaccttaccataagaataacgaagcttaaacatattcatccatttcagattcttcttaataataggttcttccgcaatattccatgctactgagtatgcaggaaagaagccaaactggttgcctggggcaaaattttctgaaccattgtaaccaaagttgaaatcaaccatatagcgatatttccatccataggtaatacgaccagcaagtcccatgtgtctattaggtagccaatcatagccggctgtactttgtgtgttgacatattcatcctgagtatatttcaacgtaccgcccaccgaatgatcaccgaatcgacgatcatattgcaaaatagcctccaaaaactgcctacggttacctgaagcagaagactcatgaaacatcagctgtttctctgccacttttttgaaaacgatttccccgttagaatctcgctgacgttcggcttgccattgttcaggccactgcttatgattacgatagttattgttataagtatcaaatccaaaacgtccggtaaacttcaaacctttcgttataaaatccaatttctgatccaaagtcgcattcgtttgaattacgttctgccactcctcataataaccggtttgtgtagcaattacccatggattagtacgttcacttgttcctgcagccggaattcttccgttcgaaaaaatcaccggcatattaataggtgtttgtcccattacggacttccacaatgcatcagagccaagtcccggatcattctgagtagaaagccagcctgaaacacctaccgtcaccatggtggtctttgtaacatcaaaatctacattcatacgatagttccaacgctggtaattggcatttgtattataatctttcaacttaccgtctgtcttatacatacctccctcgctaacatagcttgctgacacaaagtagcgtgccacagaaccaccgccacttatatcaagattagcacgataagtcattgcaccgtctcttaacaatacatccatccagtctacattcggatacaaatccggatccagtcctgtctgaatcagtctcaactcatcttgggaatacattggctgttgagaacgagttgtacgtgattcgttcagcatggtagcgtaagtataaccatctacaaagtcaggagtcatggtacgtgtattataagaagtttccactttcgcattgatattaattttaccagccttacctctcttagtagtaatcaacactacgccatttgcaccacgactaccataaattgctgtagctgaagcatccttcaatacagagaatgactcaatatcttccacattgacttcattcaggctacgttcgaatccatctactaaaaccaatgctccggaacctgccccaaaagtagagataccacgaatccagaattctgacatattggctcccggtctaccggaagtctgccttgctaacacaccaggaacatttccagccaatgcatttgccagacttgaagtaggagatgacttcaacacattcacatctaccgtagaaactgcacctgtcattgttattttcttttgagcacctgtaccggtgataaccacttcatcaatcacactagcagaagattctcgcaatgtgacatcaatcttactcatattatcctttatcaggacttcttgtgtttcaaatcctatataagaaaagatcagcgtactgtaaggagctattttaatcttatactcaccatcaatgttggtgataactcccaaacctgcaacattctttaccgaaatattgactccagccaaaggtatcttttcggcatctctgaccataccggttacctctatcgtctgactctgggcatacatatcaatgacgtaacctgttgtcaataataatatcataaataaaaatttcctcataaaataagaattgtgtgttaatcatcaatttactgtaatgcaatggtacgaacacggtgattaccgttgtcaccaacatagaaagtacctgtagactcttcataacaaagtcctaaaggatagttgaaacgtgctgtttcacgaggatcaccgtcaatatatcctgacacgatctgatctgtcgaataacttccacgaccggcaaacgttgtaacaataccatcaggagtgatcttacgaatacaatgattggcagcatcagtaagataaaaatcatatatatccgcacgttgctctgccacatattcttcgttcaacacaaaacacccttgcattggattatcaaaacgggcagaattctgggatgcgtccttgtaaccatatgatccgaactctccagcaaaagtaataggagtttccagatatttaccagcccaattatattctgctttcatcacacattgcttgtcacgtgctattaaataggcaaaatttccacttggatgaaaagtaacacattggaaccagccgcttggtcccatcttggcaatctgcttcggatcccacatttgtgtcttctcattccaaaccgctttatgaagcgtagcatcacgaccacgacacaaaaagatagtaccatctataggatgcgtgaataatgtattgaaatcatctccatttaaagccggataagagtttttaaaattttctttacgaagtaggtaataagctcctgcacgttctacattcccctgcggacagttcacaaacatagtatccctgtccacactccagccaagtccactcggagcactactccaaccagcagcaccattagtaatcacagtagctatggaatccttatctagataaattttacgtaaactatgttcattctcgaaaaaataaatgcaacgttcgcctgatgattcgtcatagtacatggcaagaggagtttgagttcctgctttatcaaaattaccatccgtaatagaagtattgccttcactatctactacaccgcacaacgtgccgacaactacattatactgataagagaacttttggtcaaatgtataggtagcattcaaacttttatctttattcaatatatccacctgcacagaccctccatccgcacgggaaggaacaatacaataaatctgtgtaccggaagagctaacaaccttcgcttccttaccaccgacaaccactcgtatcagtgagggatcagtcccaaaattactaccattgataaacatgttcgtgcgtacagcaccttccaaaggagaatagtcagtaaaaacaacttcaacattaggatcagaagctacataagacggaagatttacttccacatttttgtccatgcaactacccaatccacccaagcaaatcaaggaaaacaatacaaacctaacctgtttccctcctttttttgttttaaaaagacttttcattgtattaaattattcgttaaacaataaatataaaaatcaaaagaaaaaataactatgcattattccaatgtgcactattaacgaaatgcaaaataaaacgctatcctattaatagaataaaaataacggttcaataaatgacaaaaacaggtcaaaaacctataaaacagctatcctagtatgttttggagcacttttactattttagcttatgttgtgtgcttttctctattatcatccaacctatatctcccccccccgaaagtgatattacatatagcatagttgtataaatggtcataaaaatacaaactctttctaaaatggagcaacatcagaaaatatcaactacagtagtatctggcttgcccttcattacttatataaaaaaatagtgggagcttttatcaccccactattacatttctcatactattgcttgctccagcaaatagattgcaaaaaccaagctttattttcgtcattcaaaccctgacgcttcaaaacctccgggaggtcagtataacttttccaaaaatcggaaactaaagaagagatcttctccggtgcatagattaccgcttcactcagacttcccattttaccaaattcttccttaaagcaaatatatgaatcacggtattttaactgctccatagatttagctattcgtctagatactcccaacaagccgttcatatcagctgtttccgtaggataaactattttaataaccttttcctgatcacatgacaaaacaggcaaatcaaccgaaagagcaaactcttcacccaaatattcatatttggcaggttgaccatttacagtgacagactgaggaacaagtgatgagagcactttcactttgaatgaacgagattcaggcatatctttatatcggccatcacgtttaccgataacaatcgttcgttcctgcccttggctgaaagatgttaatttagtcacagcatattccgaagcatagttcttatcatttccattatcttcataaaaattaaaggacgaaattccatttccaccagggaatacggtaacaacaacctcctcatcattaccgttcaggttcatcacctttcttgtatacatcggcaataccgctcccgcttttacataaatcggatattcgtcaatagcaaaaggacgttccactatttgtcctcctttcagtaaggtacctgtatgcaactcataccattcaccttcgggcagccacacacgcacttgtacataaccatcttttgcaggagctgtggcaggagcaaccagaatatcatctccaaacatatattcattacggaactcatatgcttccttattatccggatgatcataatacatcggacggcaaagtgataatccttcatcataacctttacgagccattgtataaatataaggcgccatctcataacgttgctggattgtcttacgaagaacatcacaatattctttgttgaatacccatggttccttattcaaaccggcacttttttgagaatgtgtacgcataatcgggcttaaggctccgaattgcaaccaacgagtgtacatttccggatctatactttcaccgatatgtcctcctaggtcatgactccaataaccatataatacattggaagctgtcgagttgaagtaaggctgaaaatctaatgatttccatgaaacaactgcatcaccggagaaccccacctgatagcgatgattacccaaacctccccaacggtgatatagcatcggacgtgtgtccctgttcttttccatattactaaagaaagcataattaatccaccaagtgttgctcaaattcttcaccttcggatcatatatcctttgttgccagtccagccaccaaaaatcaacaccatctttctccattggcgtcaatacattcttaaacatatttttaataaacttcttatctgaatttatccatggaatagtctgtttggactgaggatcaactcccatatcttttgctaatccagaatatttttcttcataagaagctactccatccgccggatgtaagttaagggtgattttcacatcattctgtttcaagtatcccaaaaactcctttgggttcgggaataaatcacgattccatgtccaaccggtccaaccaccttttccttgttctgtataatgccagtccatatctaccaccaatacatccaaaggaatctgataagtatggaaattatcaatcagattacggaactccctgtcagaatataaccaatagcgtgaccaccaataaccaaatgcataccggggaggtaatggtacttttcccgcaaagagggtataatctttcaaggcagctttatagtcatgtccatatgccatgaaataccaatcctgtccgccattagccggacgctctttcacccaatcccaatctttattatcatcaaacaaaagtccctgagaatcatcaatcagagtccaaccgtccgtagccaacaggccatcttccagtttcagtttatcacctttctttgtatcagccacccatgtttgtgtctgtgtatcaccatccataccatccaatgtacgataggttcctttcaagttgcccttctgttgcataccgggtttccaagtaaaaggtaatatttctttagaggcagtgataaccaagttcttatctgtaaactgtccactctttttcttataacgcatcttcattttggaagtcgttatttcaacccatcctcctcttgtttttagcttgtaatctacctggggatagttacgattcacaacgatgtgagatctatcgtccacgaatttcccatccggtgcatattccagacggattgctccatcagaaatgactgtaaatcttacattgccatctgtataagcaatatttcgctgtgtgttttgcgcatgcaatacaaatataaaactctgcatgacacagagtaaaagcaataatcctcttttcatgataacatttaaaagcaataaatttataattcgagaataaaatagggtcgttgcagttatcatagctacaaccaccctatgtcaactacttactcttcttgaaagtcggagcttccgccttcacaaccggtccgtcccctacgagatacggccaatcatcgtcatcccaataaactctatcaagcaatactacacgacctaaagatggatcggcagtccggtaagcatgatagataatccaatctttaccttcatcatcctgcactatttcagcattgtgccctgtccccagaaacgcatcatttctgtgtatcagtacctcatgtttattatcattcatgttgtcacctgatttattcaaataaggaccaaaaagctcggtggaacgacatacaactgtctggtatgtactatttgcaccgtcacagcaagtacctgtagagcagaacaaataatagtatttacctcttttcaagatatatgatccttcataagcattggtacctccagtattggcagcaacctgtatttttgtcgcttttgcattttcaatacctcctttcagtccaagaccgtcttcagtcaattcaataccccaaataccataccagcttccccagaaaagatattttttaccattatcttcaatatagaaagggtcgatactattatgaacatcgatctcattgctacggaataatttgccttgatcggtaaacggtccttccggcttgtccgaaacagaaacaccaataccacaagttgctccacctccccacttggacaaggagtaatacatcacatattttccattgatataattgatatccggcgcccaaatacctgcttccggttcccatgacggttttttatcatcctcgtaagcaccgcccacataagtccagtgaaccaagtctttggatttgtgtatccatgtatttcctccggtagcatacaaatagaaatatccgtcttccgcttttatcactgtcggatccggattatcggaatcgatgacaggatttgaataccacactttgtctgccaatggagcttgttctgcttcacctttctgtttatcgctgttaccacacccccatgtaagcagggaaaatattccaagcgtaattgtatgttgtaagtataacataagttctcagtttttattaattttactaatctattccatactcgaattcaattcaacaccaggtcccaatacaatatggattatggaagtctttgattctttgtccgtttctgaagtaattggcataccatccgactgaaacgcttccaatgtaatgctaaactgagcttctttttcgtccactccaaaagctttcatatattccattatctgttgattggtaaaaagctgttcgcgtactccgttataagtaagtatgcttttatcttccacacccattgtttcagttatttctccatctacctgcagtcctaaagtcataacatacttcgatgctgtttctatatccagccaacggtagacaaaagcaaccccatccatattttcctgtgtaatctgtacataataatcatcagattccacttctactctcggtacacgtggttgtgggtcaccctcactttccacatctccacatgctcccaatacaaatatattagtaagcagatatagtattataaacagttttttcatgattttcatattttaatttacttcttatggagattattcagtcggctccaaatatatcttcatctcattaaggtctactgtcaaaatgtatttaccatcagcagcaacaatccatttcaagtcaccgccattatcctgataccttgcttctccgagttcatgttctacgcccggatttgctccttgtgaaggagcaaaaaagaattttcctgcaaaatctgctccattcggctccaacgccaacttaaactctttaccgccataaaagttacctgtatacgtccaacgttctggatggcgtggatcattattcacaaatgcaccttcctttttcattttaccccaatcccatccgatggtactggcatcgccaacaatccaaatcccaccttgcggtaaagggtaaatactaacgatattcacatccaaacgatttaagtccacaactattgtataggtaccgctttttgtgttttcaaacatctcaccattccctgcttctgccacatattgcaaagaattatctccattctcagctttcatgtagcatggataatcagaatccggactaagtgcaaagaagtactcacatggcttcaattctgctgtcgactgatatactcctgaacccacaaccttctcggtcattcggcgaacagttttctctccagcatcatccaccatcaccatatatatcgcagtagcattcttatcatatccgatcacattcaattgcgtcttcgacaactccggtttcaagtattctacagatgaattgacctgtcctataacctctgcttcaatagtcaccttatccccaggaagtatactccaagaagccagtatatcatttaactccttatgcgtgaaactaatggaacgctcttccgattcaatctcatacaaatctgtcacattagagtgtaagtctgccatatacattctgaaaaaataggtgatagtagcatcagctcctccacgttgagctgcagcatcccatgtaaatataacagctgcttcattctctttttctttctccaaagtaatttcagaagaagaagccttcaaaagcatctgatctacaggagtttcaagcgtgtaatactccggatctttattacagctcgctactatcaacataagaaagagcaagcatattagtttcattatcttattcataattatgcttttcatttaattaattccagaaaggcgcctgaaccaagttcgtgttcttattcatttcatctatatataccgggaaccagtacatcgcccttttccacacacgtgtctggaatacggttctcttataaaattcctgactatttgttcctgcgaaattcataccataatcatctccacacatctccgggagctgttccacaattctccatcgacggatatccgaccagcgtgatccttcacagcaaagttcaacacggcgttccatacgaactgcctcacgtactgccagttgattgtcatctacatgaatgtattttgcatcatctgccgctacggcatccaacgtatattggcgcacgcctgcacgttcacggactttattcacatattttaatgcatcctcacgagatgctctattatcataagcctcattaacagcctcagcataatccaaataggaagcagctaaacgatataggaacatttgacgccatttgtaactaccattcttcggattatcctgtgaatatactttcttacgaaccaaataaccattttggggtgcatcatgtgtataatcattatctttctgattcttaaagaattcgaatttacgctctgccaaagcataccaagaaccattataacttactgtagtataaaaacgaggttcgcgattacaatacatattatatgtaccttcggcagttatttctcccttttgccctgtaccaccagtccaattagtagatcgggtttctgtctccgttgaaaaaccttcttctacatatttcgaattatcatcgtctttcggaagcccattcttcatgaagaacgcgtccaccaaaccttgatatacacctaaaccatttccaccaccatattctttagttacagctttattcgtatagaactggtaactttgataagcatcttcttttgtatatgggaacaatatctccttatttccatcttgaaatttcgtaaaccaaagattttcaagcgaagtaaacgggtctatttctccctcatcattatattctacgtacaaacgataaccggcttgctctgctacatcaagcaatcgtttgcaggcttctgccgctttcacccatttttcctggctataagtagaattgaacaattcctcaccttctttattcttatgtccaatgtaccactcatttccatttaccaacggacttgcagcaaataataacatcttcgcacgaacagttagacacataactgaagttatacgaccatatttctccacactctgccatacagcaggcaattgtttagatgcttccaacatctcattatccaaatggctgacaatctcatcaaaaggtctttgtccgaccattaaatctgaaagagtaaagtcagtcggagcaatgtaattcggtctaaatgggataggaccgtatgtctccaataattgccaccaataataggccgcaaggaaacgtgcttccgctttcatataatccacttctctctgaggaaggtcggaatcaggtaatgcatgtacacgttctataaaaatataagcctgacgtatttttctcggaagaccatcccagaaatttcctgcccattgtgtattcggtgtccatccaccaaaaatcttggtgatattgggccagtcccattgctgccaacgtgcagaagcagtcaagtcatctgcaaacacttcccaaccatacgtatttaaccagtcattacccggattagggatacggctgtatacattggccagccatgattctacttttgtcttattctcaaagaccatgtctatatcaatttccgtatccggttctttatcaagatacgtacaggaacccaacgatacgatgcctattaaaccagcaactatatatttcttaagtttcattatcgtcattttttttaattagaaattcaggtcaactccaaacattacagaacgcatagccgggtaacgcagaccggtgttcgtatttaattccggatcccacagtttgaaaggagagaaacagaataaattattaccactcacgtaaaaacgaatagctttagaatgtatcttatcagttacagattgcggtaaagtatatccaagttccagcgttttcaaacgcataaaacgcatattctttttccaccatgtagaattccggtagttctgtctgttaggttcctccgtcaatctcggccagaatacatcttgggaaggattctcttctgtccatctgtcgttataattagagtagacattgccttgtaatgtttgtccactacccggaatgaaatacgtagttccaccaatcacacgataagtatcacctgttccctggaagaagaaattcaaatcccagtttttgtagctcacattacctccgaaaccataaacaatacgcgggtctaccgttccaccaatgtatccttcatccgcatcagtgataatgccatcgccattcatatctatatatttgatatcaccgggacgtacttttgaagctccaacgtcctgtgtcggtataccgaatttcaaattaccatttgcatcgaaatcatcttctgtaaacaatctttctgcctgcaatccatacaaagtatttaatgaacggcctgtcaatcctctgtatgtacctttcacagtttctggctcatcgtattcgtccaccctattaatagcatatgtgaaattagaacggaaacctacaaaccaatctttattaatttgtttattatagtttaaggagaattccacaccgcggttagtcacttcaccaaaattggcccaagggttagtcaagaatcctgtctgtgaaggaataatcttacgctgcataaagatattggtacgtttttctttgaaaacatctacctgtaattccaattcattccataatcccagttcaaaaccaaggttcattttcagagctgtttcccaggtaagattttcaactccaacttctccttctgaaataccggtacgaccaatctgtcctgtatcaccccagttatacttatctgcattggtattcaatgttgttatataggcaaaacggcgtcctccgatatcatcattaccaacttttcctatagaacctcttaatttcaatttactcaatgtatttctgaaacaatccatgaaaggttcttcagacaataaccatccgactgccacagaagggaaaaagccgaaacgtttacctttagcaaaattctctgaaccattatatccaaagttgaactccgtcacataacggctatcgaaagtataagacaatctacccgcaataccttgttttctataaggttgtacactaccattatcataactttgctgattatacagaaacaatgcatctacgtcatgctttccgaaagtgtgagcatacgttaatgttccttcaaaataaaccctcgaatttccatattcccctttatttccatgtcccaaagagtcatctccatatttaagtacagaatgaatcagattaccttcaatgtcacgtccggtagcaatactatgataagtagcatcctttccccttgtaatcgaactctgattccaacggtcgaaagaaaaggttactttcgcttttaatcccggcgtgatcatcttcagattctgttcaatagcaaagagtgactgaatctgtgaagctgtaactacgtcgtaaccttgctgtgtcaccgctgcccaagggttcacatcattaatagccataattggaatagtcccatctgaatagcgggcaggatacacgaaaggagaagttataaacgctctatcaaaagcatcgtccgtactaaatgcctgtttgcggtgtgtttggaggaacccaccgacatttaaacgcagcactgttgtcttagtcacatccaagtcaacattcgcacgcatattataacgagttagtttcgttcctgtatcataaggcaaagacttatccgtctccatgattcccttctcaccgaaataagaaccaaccaacgaatagcgcaggaaatcggaaccacctgatacagtcagattcgcacgagtagaataagcataatcctttgttatttcatccagccaatttacatccggatacaaatctctgtcataaccatatctcgttctgtcaatctgctcctgactgaaaggcaaacgcgacttattctctgttatttcatttatcaatgccatatgatcggctgccccaataaaatccggaagttttgtcggctctgcaatagaatgttccacacgcaaattgacagaaggagctcctactttaccacgcttcgtattgataacaatgacaccatttgcaccacgtacaccatacatagcactcgccgatgcatctttcaatactgagaaagattcaatttcagcggggtctatgttattcaagtcgcgctcgataccatctaccaacactaacggagattgtccaccggagaaagaagcaataccgcgaatccaaaaattcgaggaatcgtaacccggttctcccgaacgttgaaccgctatcacaccggcaatctgtcctgccagattattagacaaagagcgtgtggcaccaacctgtaacttcttaggctgtaatgtctcgatagaaccgataaccgacattttcttctgactaccatatccagtaactacaacttcatccaaggcttcaatatcttcttctaaaattacatcaaaattaatcttacttccaacttttatttgttgagttttgaagccaatatacgaaatctctattacagaattctttccgggtacattcaaataaaaatgtccgtccatatccgtaatcactccagtccctgtctgttccagtacacgtacattcacaccaggaagaggattcttgtccttatcggttatcgtaccactgatacgaatacctttcgcttgctccgacatattagtcttaccagacatagaagaatgttccggtaaagcggagttagcgcttgttccataatagaacaacaagcaaacaaacaatgctttcttcaagtccataatattaaatttaaaaaactcataataaatactttatctcatattgagtgagagcaaaagtagacaactaatacaaaatgtaataaaatagatagaccaataattaaaaaaaatcgttcaaaatgaaattaaaatataattgagatatcttctgacctatttctgtcattttaagaaatgttccgcacgccccggagtcaataactcccacaaagaagcgactgtccatcccggtgcgaagatatcgttataataccctttcccatttttgccataatcccagttggtatgttgaacgacttccggataaaaaccggatttggcaattccacatagatgcccttcatgaggtaacaattggcgcatggaagtagaaatcacctccgcgaaatgggcaaaacgtggctccttatattcctttgacaaccattgcagtaccgaagcaaattcaaaaacaaacacatcaatatggttattttctacagaaacattaccccaaccacgagtttttagaccgatatcacccaacatctgaccttgagcaaaaggaacgtcccatacataataccatgacaatgcaaaataagcagcctttcttgtcaggtcggcataatgacgatgctcatctcctttcgttatcaacgaaagataataagttgccgtagcagcataaagagaagcctctttatcttcacaattggcatcgagagtagatgaaaaatagtcagctttagatatcaagactttctccaaataatctgctgtccttttagcactagctaaataacgtttatccttaaaatatttatatcccattattaaaggtaaagtggccgagggtgtacttcctccactattatcgactattgtaaaatcatcgtggaatttacgggggaaactgccatcttcatgttgcaactgcagaagtatatcgagcatatttttcatcttttgttcccattcaggatgacgacggccattctccctttcataagcaagaaaatgaagcatagcataaactccttctgattgacgacgaatactatgtacaggatcttcataccctctatcaaagtttaccgattctttaaagaaaccagcctgggtaaagccattcttcaaataactatcgaatactttcatactgttttctttcagatcttctctgccacattgccaactatattcccaagcattgaatgcattaaggagtacacggccaataaaaccaacttctgcctgaccgttactctgacaatcagcagtccgcaaatgaatacccgaattaaaagtcaacgaattaccagtcaccagactattcacaaaaaaacggctcataacttctttcatatcctcaatagaataaggagtatcaaccggaaccggagcataagtgtcatagctatactcccacgcattccgaataaaatcagaataatcatcagctttattctccaagatctcccatgtcagtaacattgtttctccttttctcagagactgaaaagcctctaccgccggagccaatgttaattttcgaatatagcttttaggtgcttcacggtaaggaaaaccgaaagaaagtgttgccactccattctgattttcgaatccagtaaaacctattgaagttttacctgaaagaatgatttctccctctcgatgagtagacaaaacctcattagcaaaattgtctatacgactcaccgtcacaaagcttttttccttttctgaataaatacctgtaagaggagcactcaatctatcctcacgcaccaaccagctgtctgatgtatgaaatgaaggtgcttccttaggagatcgcagattgcgacgataccagaaccccggcatatagaactggcaatcatcatgattaaaaccggttgacaactgctcgctaaaattaaaataaacatcctctaatgcagttagactgacattgatacgtaacttaccattcatatcctccattctctgagttattaccatcggaatacctttggaaggttccaacagataagatgaacagtcattcttcaactgccgcatatccagcgagtatttttccgattcatttcccggtacttttaaggaaatagatgctgaaatcttttctggagtataattgacggcttcaacagcctcaacatataacccaataagtattccacaaaataagcattttaaattcatgtaaattcaattaaatgaatcagtaataaaataaatactggttctgttaatacactaataattcattttcaaacttgagcaacagctaatattttgtagcctgtgtgatacgcaacaaaagtatggaattctaccagcttaggatattaaaaacaggtcaataaatgaaattccagtctcaatttccctcccaaagtatacatcttctgactcttatttacgcaaccgaaaaaattgaactcatttctgaagccggacatatgttttaccatccggtccgactcctttaactaccaacttcttccaatgtcctggcaatttcgaaggcaattgtttaataccgctatctgtaatttccaaaccacaaaagccattgattacagcctgcaaaagtcctcccgcaccagttgagaaataaggattagtacctcctgcaccttcagaaagtacaccgaacggaggtagctggttgggacggaagctttgcacaaataattcataagccttatccccttcaccaaggcgtgcatattgcaaagccaatacagagaatgacattgcggggcctcctttgtcaatctttccctcataatactccaaatccttacgaatttcttccggacgggtaatcaggttcaatggatataccagtaaattagcatccgcctgcttgataacctgtccattataaccatcatactccatagtcactccattttcaaatttggggatgcgcaactttgctgctatttccttccaaattactggagctttaagcccacatatggaagcagctttagcagcatcctgtaatgcgcgtataacagtaccgttcgtgaaggcattatcatcaccctctgcgtattcatcggcacaaaccacattacgaatcgaataagaaccatcgtcattcttttctacacgacttacccaaaattctgccactttctccattaaagggaatccttcttcacgcaaccatcgctgatcgccactcatacagtaataattccaggccgcaatggcgatatcagctgtgatatgatgttcaaaaggaccagtcaacgcccaagtcggacacgcttcttctcctgcatcatcactttcccaaggaaacatagccccatcatatccataacttaatgctttctggcaagcagcttccagcctatctgtacgataatccatcattgttcgtgcaatgccctgattcataaagagcataggcggatacatccaaaattcggtatcccagaaaatatgcccattatatccctgtgaagaaagtccaaaaggaggtatactcaaccgacttcctttgcgtgcattggaatacagattataaagtgcaaaacgcacagtacgctgtgcttcatcatccccctcaatcacaatatcacctttccacatctcgttccagagtttccgatgcccatccatcagacgcgtcaatccctctttcgcaccataaatcacttcacggtctgactcattgtatggatctataaaatcacgtccggtacaaacagcacctaataaagtaaaaaagaatttctctcctttctttaatgaaatagaaatctgaccactcccattatattgttgctgcacactggaattcttatcataaataaatgcggaagaagctgaaactttttgttcgcggtattttgataaagcccaagtacgcactatttttatatcattcccattaacattcacattgaccagtttcgaacctatgtttttatactcatcaggtatctcaataggatttgacactgtcaaatacatatcccccagtgccacaacctccacacgaaccagtcctgcataaggtaaatttcttagagcacagatgctataagatacatccgcttttccatcacaagtgaagtgcgtattatgggtagcctctttcatatctatacactgttcccatctcgaaatattatcaccatttacagtctgtccattaatttgcatctgcaaattgaatggattgattcctcgtaaaacacgactcacatcttgaggagtagcagaatcaaaaacatggtttagcatgacatggcgaatagaaaacggttctttccacggcaggataccaatccccccattggcaactgttgccccgtaataagttccgtgataatcagttgtctgtatcttccacaaactatcctgtccatttgccttaatagtaagagctgataccagacaataaaatacgataaatagatttctcatataaaaaataagatatttaatttgttaatgacatccgacacaaaaatagggcgtatctgccaatcattaggaaataacctgaccaaatgatgtgacaaataaaccaaaagcgtactaaaaataatatttaagccaattttgttaccaaaattggcttaaatcaaaagacagattattttatcttatttaaatacgtacttcaatcggttttccattcgtaatcttacttctttttacaatcttatgatccttttttatcagaaccaacagtttgtcatctttatcgcgcttcacctcaatatcgaatatggaaccaaatgcacagatacgtttcaatgacatcgtattccaactttccggtagctgcggtgtcatcataaaagcatccaatgcaatgggacggataccgaacaacccctcggtcataatgcgacaatacaaagcactttctgtggataaatgcctttggtttccctccggccacgcttccactgcgtaaggaacatgatcacccaacaaacgagtagcagagtatttatccaaatattcagtagctatatctctggcaccacaagagtaagccccccggaaagcatagagtgtagaacgatcccaataagtagaagtacccgattgagttaacaacccattctccatccacagtttatcagagaatagagcctccacagtacctttcgcctgatcataaatacccatagtcagaggaatgcaaatccatgaacgcagcactgtattaccatcataataacgataggtgtcatacccctctacattacgggcaaaatatgcatcaatattcttataaagttcagcagccctatcctgataagactttatctgtttatgttcttttttcagtgcctttcccaaataagcagctgaaaccaaggcatcataatataatgaagatgtacatagattggcttttccggcaggaaaacgattttcaagttcatcagaatcagattttaccaccccatccgcattcagctggcgatgacaatattccagacaccattcaatcagcggccacaatttttcagcctcattacaattaccggatgccaaagcataacgtgctgcgccatagccaaccattgctacatcaccacgatcacccgcaacaccaaaacaatcaatcccttctgcaattatagatgaaggtaaaggtttatactcatcattcatatagcgcataaacaacccgaatgaatccatagccgaacggtttccggcttgataacctaaatatggaaaaaatggattgatatattcggcctgatcattcgcccaaacagcagcgtaataagcttctccacctgggctctgcatatatccgcctttagtatcaaatatgctttccgaaccacgtatcttggcaaaagaaaacatagtattgattacgtcactcggagtctctaacacaaggttaccctgtatctgactcaaaaatctccgacgtgccagaagttcattattaacatccaacgccaactcctgatcatgtttcttatatcctgcatagattacctgaaaccaggccttttctccggctttcagtagataagtaccatcttttaccggagaagaaagggtagccgttaatgtataactgccttccactccttttgcctcatcagtataataagaaagagtggtcgatgggagctgaactgtctgtgggtgatctgtcgtattctccaactcatatttctcacagaaggccggttgtgacgtggaaggaaaaagtgtacgtgtcaacgaaatccctctagtagcatatacactctttacagtcataattccattcagcgatacagtctctaccttttcacctactaacggctggccatttacaaggcataaatgtgcccagtctccattaaaatgatgctgcaaactaccatgggtatcattagggatagtacgaaaagtaggtaaaaccatattccggtcaatcacccattcaccagcttcattaacaccatagcgcaatactgttgaaactttcagtccactcatttcaatatggtcattatgcacaccattcactctccagcaaatactgtcaggtgaagtaatcacccatctcgttatctcactggcattcagaaaactggtatacaatccaattagtaatagtgtaaaccacaaagtcttttgtctggtcatcatatcttatcgtattattaaaattttcacacttataaattataaatcctcaatataacagatgatatagagtgaaatacaactctatatataatctactcttctttcgaattaacaaaatccttaggcaataccccaaattgcttttggaaacatttagcaaagtaagacggagaattaaatcccaccatgtagcagatttcattcacccggttttctccctctttcaacaattgagctgcctttttcaaacgctccaggcgtaagaactcattcggactcaaatccaacactccctttattttccgataaaagttagacctgctcatattcaggttatctgccatgtcatccatgctaaattcaggattggcataattaatctgaattacttcgttcaaccttttgataaattcctcatcagcttttgttaaagccattgtattagcagctataaaaggagactccgcaaaagcttgacgcagtttctctctattctgaataaggttagaagcacacgcttgtagatattctacagagaaaggtttttcaatataagcatctgctcccagttccatcccctctatctttgattgtatattggtcttggcagtcagcaggataaccggaatatggctgtaattcaaatccgacttaatcgtcttacacaattcgaaaccatccatcacgggcatcacaacatcacttatcaccagattcacatagttaccatcaagcaccttcaatgcttctgcaccattagtagctgtcaacactgtataatctctcgacaattgacgaacaacaaaagtaagcatatcaggattatcttctactaccagcacagtgggacggttatctttccttcccgcctgttcggcagggatttcgtttaccctatcaatttccacctccgcctctggggttaaagtgattgtcatatcctgaacgaccggtaaagtcagacagaaaatgttactttcttctcctgtctccatagccaaagttccctgatgtaattcagccaacgagcgagagagtgccaaaccgattccagtgccagtagtcacctttccatcctcttgctcattgaaacgaacaaaaggtttaaaaatctcctctttcatttcatcaggaatgattactccatcgtttactgtgcgaatacggaatagattatcatcatcagtttcgggtatttccagcattacatgtacataactctcggcatatttcattccattgttcaacaagttgctgatgatcttcgtaaatgcttcctgattaacatgggcatagaaatctttttctggtacctgtaaggtaaattccaaccctttctgttttgcaagagaagtgaaacgtacatgagtttccttcaagacctctgttatattgcattttgcaaagttcaaccggaatccctggctttccgtcttgcggaagtcaagtagctgattggtcagattgagtaatcgttccgtgttctgtttcatgacgttcaagtcttcacgggtttcagcatccacttgttttttcagtatgatattttccaacggacctttaatcaatgtcaacggtgtacgtatttcatgagctacattcgtaaaaaagtcaatctttgcatgataaacttcacgttctttctcctgctcaaacttctccatctgcctgcgatgcttgttgttactacgcctcttgaaatatataattacatacaaagaacaacctataatcaacaaagcatatacaaaataagcccaaacagaaagatagaaaggaggaagaatatgtacttttaatgatattccattttcattccatactccatcactattagaaaccttcactttgaatgtataattgccatatcgcagattggaataagtaacaatagggctttcgccaattgtcagccaatccgcatcaaaaccatccaatttatacatgattttactcattcttggagcttgaaagtccaatgctgttacccggaaagagaaagagttctgactagactgaagaataagttcatcagagaaagtgatactcttttccaatggagatcccggttcaccgacatacacttctttgccaaacaataggaaatccgtaatcacaatagatgggagcgacctattctctgaaaaggtcttcggattgaaagcgataaagccgtcgatacttcccagataaatcgtaccatcttccgtctccaggctggagtggtaattaaactgatcgcccagcaaaccattggaggtagtatatactttcattgctccggtagtaggttggaaacatacgagaccattattcgttgtcagccagaaaagtccatctttatcttccacaatctgataaacgacatcatttggcaatccgtctgccagattatagctggtaaaggtttccgtttccggatgaaacaaacagaaccctccaccttgagttgtcaaccaaacttgtcggtgagaatcttcgaagatacttaccactttatcataaggaaggcttttcggattattttcattatgcaaataattcttccatttcttctcacttacattataacagtaagcaccgtttgcgtaagtggccagccagaggtttcctcccgaatcttcttttatatcatatacaaaccgggcattcagttccggtatccggtcaaaatcatcagattgtctgttgtagcgcaacaaaccgaataaagtacccagataaatatcccccgtcgtcgttcggcaaatggagaaaacgctattatctatcaatgaacggggcgagtctgtcttctgataggttttcacaatagctcctgtacgagtatccaccacttttactcctttcgagaaagttcccacccaaagattatcatcaaccaggcacagtccgtgaacatttgtaaaagcattacttggcgtaaagaaagaaaaagtcttggttttaggattaaaacgattcaagccaccatcttccgtaccaatccatagaattccctggttatcttgacagaactcacgcactcgtttcccgtgcaggccattctctattcctttcggataatatttctcgaagttcgtataaaaacgaggatagtagtttataccgccgaagtaagagccaatccaaatgccaccctcacgatctttacacaatgaataaatggcattatcggataaagaataaggatcattaatcgaactgcgcaaatgaacgtacttacctagccggagattatagatataaagtcccgactctgcaccaatccatagttcattgtcagaagcaaccaacagttcacgacagaaaacagactccccggattcatcttcgaaaagtaaatcatgcaatttgtttgaagtcagattcaattctttcactcctccttttaaagaacttatatacaagcagttgtatgcaccttttacaatacaggtcactacgtcgttcgcataaatttccttgttattcacaggcgataaataaggatggagagttttcagacggtctttcgaatagaaaagtccatcgccataacagccgatccaaagggttccgctattgtcaaaagcaaaagtctcaacattggtggtaagaaaggagaagttctgtaaggtatagttctgaagctctcctttttccagattataacagaacaatccctgtgattccactgccatccagacacacccctgattatctccggagatagccgtcacagtatgttctatccttgtattctctacactttgtttggtaaaatgctcgaaagaatctttttccggataatagatataaagccctacgtccgtacccacccagatacttcctttttcatcctcgtaaagtgccgtgatgaaattattgcctatgctccgctgactacggtcatcatgcttaaatttacggaatgacagaccgtcatatctgttcagtccatccttggtgccgaaccacataaagccctgcttatcctgtaaaattgtatttactgtattctgcgataatccattctgtacacttagatttttgaaataatagtgttcgtctgccacttgagcgtgacagagtatctgataacaaataagacagattaaaagagtcagggttttcttcatactatgtgttttctatcctttcgttttgagttaccaaatgtaggcaaaatcatagcggaaagatagtaaatatgtctcaatgaatgaaagaatagtcctatttttctattcggatacacgcatcaactgttataacggctctttgcgcagctaaaaacggatttatatccatttctttgatttctgtagcgaaatgtagcaaggcggacaaacgaacaatagtttcagcaaatttatcttctttgactctcttttgtccacgtgttccctgaataattatataagcacgcagtgaatgaatcagaaatctgcaccgacgaacgaaagctactagctcctctttattatcggaaacaaactcatctaccagcggagtaccggcagcatgcagtaatgcttgtacgtaattggaagcaatataaccattctccggaatagaatcaataatgcgacgaatcctcaaaatgtctaccccgcaccttcggcatagacgataatgttcctacaaagacaaaataaattccgaataatgaaaaaggtatatcaaaaattccataatgaaagttttttttaacatacctcacattctttttacctatctgtttcagtctttacagctgaaccgttacccaaaagattaggccaagctttatcatcccagtaaactctatcaagcaataccacacgccctaaaaaaatacctagtaaccaataaagaaaaaacggtttaatacagaagaagattcagccagcaaagccttacgctgttcgctgtcagcagcaaataaactggtagacaagatttcccctattgatccgttagttgttactacagcaatttgtttgacgccctccaccaattttccattttggggagaaacaatgtgccgacggctgggagagtcattgccggaggttgtaaggcattcgttgtgaagaagtatatcattaattttccatcccgaacctaccggatgattacccaaagcaagaatagaactgtttcccatatttatcaatgcattttctatcagagcctcattcaatatacctctgattgtttccaaagcatatcccttgagaaagccggacaaattgatagttactcccggctgtgaaaaagcgacactacgatctccggcagataaatgtactgaatgtacagtgttctgattgtaattttccgaatgaactgtgatatcgaagcatcccaaagtcctaccattatattccagacataaatcgatcattgaataaagttcttcgctaagaacaacgggagaaacagaggctgtccggttgagaatagacaattcgctggccggatcataaaagttcgccatcttttccagccgacacaatgcatcataaatacgattgaccacaagcagcaactccccttccggtttccggctgcataagataatatccacccgtgtatgcatggaaaggaaccaggcataaaacaaggagttaccatcatttgacggtttgtatagatgttgaatagtggtctgcatcgtataaaacacaaattaggcacggattacacagattacgcggtttttatttcattagagtaaccgtgaaacccgtgtaatccgtgcctgaataaaaatcataaaggagttttgacgtatctcctaataactagaaaacggaactatttcagttctttaatcttcacgttcttgaaccatacttcatctccgtggtcctgaagaagtatattaccttcctccggatttccgaaattaggccagtttttatatttactgtatgctaccaatgcattccacatatcattgttacgatcatactcaatcagcttaactccgttcagccaatgttctacatgattgccttttacaatgatagtagcagtattgaattctttcttgttgaatggtttatctttaggagccggaatcaggtcatacaacgagcccagctttctgttgcctttcacacccagttttgcatcaggatgcttgtcatcgtcaagaatctggaattcgcaaccgatagcagagccttcccctttattcagccccggattcacaaaatatttaactccgctatttgcaccttcagtaatcttgaagtctactttcagaataaagttcttgtatttacgggtagtcacaatatcaccaccatttgcagattcagctccaccactcttcattactttcaaaataccattttctatcttccagccttttgcagggaaagtagaaagtttagcgcctctccatccgtcagtagtcttaccatcccataatagagcccagccttcttttgcttcgctcggagaaatcgtgttggcaatcagattcacttccggtgcagcttgcgcttccggtgtctgatagcgttctacatccgtcgtacaaatacggatatccttccaacgaactgtttttccttcatcagccgcatttccaatagcgtgcacttgcaaagcaatgaaacctacaggagtcatatcatcccagatattagcacaaggaactccgtttatccaggtacggatcgaattaccaacagcttcaatacgggctttattccatgcgttattcttaaaagcggtttttgccgacggattcagtgtcaaaggataaagccagtttctacgtgcctcatcataaatgccacccgaccaagcgcgcttcgaaggatcaatctcaaactgataaccgtgtacgcggcctttcttataatccttcttgctttcactgcgaagctgtacgccggaatttaaaccatcatctatcttgaaatcaaattcaaggataaagtcaccataattctttgtcgttgccaggaatgtattgggagttcccatcttagatacaccgacaatagcgccatctacaattttatactcggctttgccattcaatttcttccatcctttcaggtttttcccgttgaaaagaggttcccagttttgtgcgcccaacgaagcggcacaaaataaaagtaaagttaatacaatatttttcatgattatttattggtccttctccatccccttctcctaaagaaaggaatggaaaaagctgtttctatttataatttataaaattcatcccaacctttacgcggcggaagtcccgccaacattgcattagcaaattcattatttgtaatctgtttcgtgcggctgtcaaagaatagctgtgtattaagccgttgagccattacacccagtgagaacacctgactcaaaacaccgttgatttcgaacggtgagcgcgtcttttcaataccgttacatgccaataagaagttttcgaagtgattggaaggacttttaggaaccttcggtaatttgccagccatctctttcgctttctcttccggaataatagacaaagtgcttccatgactcccccctttaaagattaaatctttcgtatagataatctttcccggattcaatttagccgcaggagtatctccctgatttgtcgcaggaatgttcgggtccagtcccgatactccataaccggcaggaataggaggaagattatccagaccgtcataccaagtaatgtctaccggtggcatccctttacgttgcgggaagcggaagagaatcgtggaagaataagggaagaaataatcattatgaccatttgcgtattgcatggtaacttcataaggcaatcccagttccagaaactcgtgagccgtatcgaggatatgcgccccccagtcgcccaatgcacccataccaaaatcataccagcaacgccattgtcctaaatgataatctttattatattcgtgataaggggtaactccgagccaggtatcccagtccatatctttcggcagttgctgtcccgaaggaagtttatagatattagtgtcccatttatgccaacggcgcgggttattcatgtgggcagtgatagcagttacgtctttgataattcccgcatccatccaagctttaaactggaaatagtttgcttcagaatgtccctgatttcctacctgggtaaccaagttaggacgtttaagcgcagcttgcatcaacaattccgcttcatagaaagtacgggccagcggtttttctacatatacatgttttccggatgccaatgccagcatactgatcgggaaatgtgaatggtcgggagtagcaatcgccacagcatcaaactcattaccagctttatcaaacatctggcggaaatctctaaactgttttgccttcggatatttagccataatcttttgcgtatgtttggcacccatgtccacatcacataacgctaccacttctaccatacctgtccgcgcaaaatcttcaataatctgttcaccgcggttaccaatgccgatataggctatctttaccttgtcacctcttcctttcttgggtgaaatcgtttgagcatgcagtaagtcacctgcccccaacgccaatccggcagaagccattgacatcgttttcagaaaatctcttcgtgttaccataagttatttattttcattgatattgattaagttcgtgaacgagtaaacaatgcccgtagcccattaaacaagagacgcaaaatcccccaaaaagcataaagcacaaaagtaaatatgatgatataaaaaatagaagttatcatctccgtaaatggcgcatgataagctataattgcatagaggtgtatcaaattggatactacgaaacaaacgagtaaagtaattaactctattttctttcgtcgtgcggttacaatcgtgtctttcatactgcttcgggtgtttttacagattgatggttcagataatctattttatattcatcggggaagtagagcatccgctcttcctccagtgcctgatgtcccagcaaacaaagcatacttgcatagtatccttcttccgctattctttccggttgtttttgtgttatgacggcttcaacgaacgcttccagcaacaaggacgtaccgtcactcttaggacgttctccaataatgaactctccagtgttctcatttgcagtttccggagcccaactcgttccggcaaaaggaagagaatcgaaaactttgttttcccaatcattcaccatctgcaggaaagccggtgcaggagccacattctcaaagtaatattttcccttttccggttctaccgtaccaaggttacccatgatctgttcttccagtccatagaatttattggatataacggagtcgaacgtcatcttcaccccatcatcaaagacatatacacaactcacattatcatacacatccctgccatccttccaataagtaatggcaccatgccccatcaccttctcgggaatcttacgcaaagcccaacttccgatctgaagctggtggcaagcgagttccgtcatcagtcccttcgagaattccttgtaaagacgccagtttatcaggcgttccagattgggtgaaggtaccgagcgtctccaatcgccattccggttccaaaaggtacggattgcatttatttcaccaaaggtacccgcatgaatcatctccatcgctttgatgtaacgagggtcgaacaaacgttgttgaccagtgaagaaaatctttcccgtgctacgatgtttctgatacatacggtaacactcttccatcgtaaaacctatcgacttctcacaaaatacatgctttcctgcgtcgaaagcatccaagacgattttacaatgcgaactaagaggggtagctacgagtatggcatctatcgacttatcttccagcacttcccggtagtcaccatacactttggcattaggcacaagttccaatgcgctctcgatagacggtttataaatgtcgcacaatgctacgatctcgactttggggttcttagccagaaatcccattaaaaaacgtccccgggaaccaggaccgattattgccagacggcacttttcgtttgaggtgttcgtcacctccgaaaaagcagaaagccaagggcttgctgcaagaagagtgccagccccggctatgcctaaattctttagaaaatcccgcctgctaataggggtatgtttcatgcttgtggtatttaagattataattagtttatttgaaaatcagttattaaatacaggtgctttttgtgtttcgtaagaaggagattctccttctacataaggccatccttctttatcccatttgatttggtccagcaacagaatacgtccgttctccgggatcgatcttgaaaaaccatgatacagaagccagtcttgtccggcatcatcccggataatctgcgaaccgtgcccattgcctacaaaatgatcattcgcacctatcaccaaagaataaccattcttcaacatcggtttgcccgacttatctttgtagggtccccagacttttttagagcggcccactacaactttataagtactcctaatcccctcgcaacaacttccgatagaggcaaacatataataataatcgccgtgcttatgaatataggcagcttcaaaagcagttcctgctattctctttttttccgctcccggcttcaatgacagaccatcttcagtcagctcaataacatatattccccggaagctgccccaaaccagatagtttctcccttcatattgcaggaagctgggatcaatcgagttctgtacaccgatctcattactacggaacatcttaccatgatctgtaaaaggtccttgtggagagtcggccgtagctactccaattccgcacgtctgttctcctccccacaccgacatcgcataataaagcacatatttattattgatataattaatgtcaggtgcccaaattccggctttgggttcaaatctgggacgagttttatttgtgaatgccgtgttgcaataagtccattgcaccaagtctttcgacttcatgatcggaacgtttctggtagattcggtagcatacatataaaaataaccatccgcagccttaatcaccgtagggtcgggcatagcaatatctacaaccggattcttatagctcactgcagattttgtctgtgctttcccctgtgaaaaacaagcacctaccatgaaaacgaaaacgaacaaatttacatactttttcattaaatcattcttttaaggttcctttttaccttatctttatagctctaaattaatattaacttacaaaatcttttggaagcactccaaattgtttttggaaacacttagcaaaataagacggagaatagtcctatttttctatcctgatacgtgcatcgactgctataacggctttttgcgtagctaaaagcggatttatatccatttctttgatttctatggcgaagcgtagtaaggtggacaaacgaacaataatttcagcaaacttatcttcgttgactcctttttgtccccgcgttccctgaatgattttataggcacgcagcgaatgaatcattgagtaagcttcttcgtaggaaagcggagccagaccggaagacacatctttcagcacctccacaaaaatacctcccaaaccgcaaagtaccacatgaccgaacttctcttcatactttgcaccgataaacagttccgtacctttcagcatcggctgtaccataattgcccttgcatcaggaatctgcatcatacgatcgaattccagtgccagatgttgctcgcttttgatgttcagaactacaccaccgacatccgatttatgcacaggaccaacgactttggcaactaccgggaatccgcaccgacgtgcaaaggctactatctcctctttattatcagaaacaaactcatctaccagcggaataccggcagcatgcagtaatgcttgtacgtaattgggagcaatataaccattctccggaatagaatcgataatgcgacgaatcctcggaacgtctactccgaacagttctatttcaggaactgcaggtttaggaacattgacaatgcgggaaagggcagtacccagggtcacttcatctgcaaaattcacgtgtccttttgccaggaaggcggcaacctccgctccggctgtattaatcgaaggaagtatagggaaaatcggtttcttgcaagtttgcatcttctcgtgaagcacgtcatacatttcaaacatggtaaccaatcccggagttccgaagatggccatcatggcgtctatactgtcgagtttctcctcgcagtagtcgatgcaaagacgcagatgctccggtgttccggtagccagaatatcaataggattcccaacggcagcaccggggaacagtcgggcttttagttcttcggctatttctccttccagtttaggaacattcagtccgcctttactcaaggcgtctgtcagcatcactcccggacctccggcatgggtgataatagcaaaattcttccctttcaattcgggcagagtaaacacacaacctacagtagtcaattcttcacgagagaaacaacgtacaatccccgctttacggaacaatgcttccactgccgaatcggaactggcgattgcgcctgtatgggaagacgccgcccggcttccgctctccgaacttccggctttgattgccgcaatcttacatccttttctaatcaaagacgaagcatggaataacaacctgtccggattctgaatactttcaatataaagcagtttcagatgagagtccttttcgggatcgaagttctcatccataaattgcaatacatcttctacgccaatctgcttggcatttcccaccgaccagactgaattgaactgcaaaccttttgtaacggcactttcgagaataaataccgccgtagcaccggagctggaaatcaagtccacccctttcagatttaaattgggaattggctggctgaacacgctatgatgccatgtgttcatcaatccgatgcaattaggaccaatcaatgaggctccgtatttattgactgtttccagaatacgctcttccaacagtgctccttcgtgggtttcttcaccaaaacctgcagaaagtatgataaatgccctggtttgcttcttgctggccaatgtttccacaatatcgggacacattacagcaggtatagccaacactgccagatccgtatccggcaggtcgctcacatccgcaaaagcaggaactccctgtacttccttctccttcggattcaccgcccgaagttctccccgataacctccatttatcaaattctttaatattgcgccacccggcttatgtacattattcgatgcccctactacaacaatgctttcaggacgaagcaactgggttgttatcatatcatgctttggttttcgtttaacttaggtacaaatatatcctttcttatgagaaaaaagaaagaaaaagggaagaattgtatatagaaacaaactgtaaaaaagaaaaagattaagattacaaataggttatactaactttttgaaaaatgaagccgtcatctcttcatgaaattctgatcatcagggatgaaattatttttatgcagaaaaaacggatataaaactaataaagaatctgaaatatacgccacaaagaccaagatgtatcaagaaagggaaagaaagaccatttgtaaatttcaaattcacacgaaatagagattaaaacgaattaaattaatagctcaaaaagactatatataaaaaaggatcaattatctcaattccacatttcaaattaacactattagtatctcactatttcaggagcaaccagaagaaaatttgtacctaaaaaaaacttttatctctttgtttaaaagcaaagacatgtttctctctaaccaatgaatcgttcctttaaaagcaacagaagcttcctttaaaaggaacggtgttcaattctgccaataattatacatatttacttatttatattcaaatttatatagttatttctgcatattcttacaataccttatacattatttattttattaggacgaagtttagatactaatattttgttttaatcttaaaaacagaacatgcgagaataaatccaacatatcagtaaatagctttatgttagaatagctatcaaatttacatcattcttatgagacacccccgactatgagaatgaaaaatctgtgttaatccgtgtaatctgtggtgaaaagtcattatctttgcacattgcaaagttgaaaacaacaaaaatcacactatataatggaaaagaaattcaaaagaaccaccgtcacatcggcactgccgtatgcgaacggtcctgtccatatcggtcacctggcgggtgtatacgtgccggcagatatctatgtacgctatctgcgtctgaaaaaagaagatgtattattcatcggaggttcggacgaacacggagtgcctatcaccatccgtgccaagaaagaaggaattactccacaggatgtagtagaccgttatcattcgctgattaaggaatcattcaaagagttcggtatctcattcgacgtgtatagtcgcaccacttcaccgacgcatcaccaactggcttcggatttcttcaaaacattatacaataaaggagaattcatcgaaaaaacatccgaacaatattacgacgaggaagcaaaaacattccttgccgaccgttatatcaccggagaatgtcctcactgccattcggaaggcgcttacggcgaccaatgcgaaaagtgcggaacctcactttctcctacagatcttatcaacccgaaaagcgccatcagcggtagcaaaccggtaatgaaagaaaccaaacactggtatcttcctctcgacaaacacgaagcatggctgcgcaaatggattctggaagatcacaaagaatggcgtccgaacgtatacggtcaatgcaaaagctggctcgacatgggtctgcaaccacgtgccgtgagccgtgaccttgattggggtatccctgttcccatagaaggagcagaaggaaaagtgctctatgtatggtttgacgctccgatcggatacatctccaacaccaaagaacttcttcccgacagctgggaaacatggtggaaagatccagaaacgcgtctgattcacttcatcggaaaagataatatcgtattccattgcatcgtattccctgccatgctgaaagcagaaggcagctatatcctgccggacaatgtgccgagcaacgaattcctcaacctcgaaggagacaagatctctacttcccgcaattgggccgtatggttgcacgaatatctggctgatttccccggaaagcaagacgtactccgctacgtactgaccgccaacgcaccggaaacgaaagacaacgacttcacttggaaagacttccaagcacgcaataacaacgaactggtagccgtatacggcaacttcgtaaaccgtgcaatggtgctgactcaaaaatacttcgacggtcgcgtacccgcacagggcagcttaaccgactacgacaaggaaacgctgaaagaattcgcagacgtgaaagcagaagtagaaaaactgctcgacgtattcaaattccgcgatgcacagaaagaggccatgaatctggcacgtatcggaaacaaatacctggccgacaccgaaccgtggaaactggctaagacagatatggaacgtgtaggaaccatcctcaacatttccctgcaactggttgccaaccttgccatcgccttcgacccattcttgccgttcagctcggaaaaactccgcaaaatgctgaacatggatactttcgaatggtctgaactgggaaaagataacctgcttcctgtaggccatcagttaaacaaaccggagttattgttcgagaagatcgaagacgctactatcgaagcacaggtacaaaagctgctcgatacaaagaaggcaaatgaagaagccaactacaaagctaatcctatccgcccgaacatcgaattcgacgacttcacgaaactggatatccgtgtaggtaccattcttgaatgtcagaaagtaccgaaagcggataaattgctgcaattcaaaatcgatgacggactggagacacgtaccatcgtatcaggtattgccaagcattatcaaccggaagagctggtaggcaaacaggtttgcttcatcgccaaccttgctccgcgcaaactgaaaggtatcgtcagcgaaggcatgattctaagtgccgaaaacaacgacggcagtctggcagttattatgccgggacgtgaggtgaagccgggcagcgaagtaaaataataaaactagaatagggaatacatgaaaagctatcatcacgcatagccttttcatgtattctttgcaaataacatgagcgagaatcagtcactaaaagaaaagacggccaaaggactattttggggaggattcagcaacggcatacagcagttgttaaatctgcttttcggaatattcctcgcgcggttgctcactccgtcagattatggaatggtgggaatgttggccatcttctccctcattgccagttcgatacaggaaagtggtttcacagctgcccttgttaataagaaagaagtgacgcacaatgattacaatgccgtattctggttcaacgcggccatcagtctgtcgctgtacctgctgttattcctctgtgcaccgcttatcgctgacttttacgatactcccgaactgacaccactggcacgttattcttttatcggcttcttcattgccagtctgggaatatcccacagtgcctatctcctgcgtaatctgatggtcaaacagcgggcattgtcttcggttatcggactcaccgtgtccggaatcaccggagtcactcttgcctactttggtttctcttattggggaattgctacgcaaagcatcgtttacgtaaccatcaacacagcctgttactggtatttcacccgttggcgaccgagcttgcagttcaacttcaccccgattaaggaaatgttcggattcagtgggaaactactggttaccaatgtattcaatcacatcaataacaatctgttttccgtgatactgggtaaattctacagcgaaaaagaagtaggatattacaaccaagccaataaatggtgcggcatgggccaactcttcatctccggcatgataaacggagtagcgcaaccggtactcaccaaagtgtccgacgaccttgaacggcaaaaacgggtatttcgcaaaatgctgcgtttcaccgcttttgtctcgtttcccgccatgttgggattgggaatcgtatcggaagagctgattatcatcaccatcactgacaagtggtattccagcatattaatcatgcaaatactgtgtatcagcggagcctttgctcccatcgcatacctctatcagcagctcatcatcagcaaagggaaatcccgcatctatatgtggaacaccatagcgctcggcataattctactgtcaggcgttctgttagtccactcacacggtatctatgccatgctcgccgtctatgtatccaccaatatactgtggctactgacatggcactactttgtatggcaggaaataggattgaagcttcgccatgccctgatggacatacttccttatgctgccattgcggctacggttatggtaatcacctattacaccacccgctccatcgagaatatttatctccgcctggcaagcaagatagtgcttgctgcagcactctacgtagcaaccatgtggggcagccgatcggttacttttaaagaaagcattcaatatttcatcaaaaagaagacacatgaacccaaatgaccttgccacccgataccatcttctgaatagttctttcaaaaagacgatgatttatcacataggtatagatgccggtttcttcaccgaatatacctatatgcttcacgcaatgctttattgcctgcaacacaaaatacagttcaagctctactccgacgacgccaacttcggatgggaaaaaggttgggaagattgtttcgcccccttctgcgagcaagtgcacgaaccgtttcatcacacttataacacccatcgcctcccctcctggcaggcattgatgaaagacaaaaagctgcctaagacgaagttactgaaatggaaactgaaagtaacctgtaagaacatcatcggaaaagcccttgctttcttcacgtatggcaaaccggtccgactcaacttccaagtgacgttcaaccccaaccagcatttccatatccccgaactgggaatagacggtgactacctccacaccttccaaaagctgacggaaatcacctggaaactcaacgacaccaccgcacaggaatgtctccaatttgccgccagcctgcaacttccgcctcaatacgcaggatgccaaatacgcggaggagacaagatcaccgaaaccaacctgcttccaccggaacactacatacggcttattaaagaaaagaccgccctacgcgacgtctttgtattaacggacgattaccgccttttcgaacaagtacaaacccttgccccggacatacactggtacaccctttgcagccccgacgaaaaaggatatgtcaacagcgctttcacgcagaccaccaaagagctgaaacagaaacaaatggcacgtttcctttcctcgatacagatattgatggacgcctccgtctttataggaagcatcactaccggccccagcctgttcctattgaagaaattctatccggacatcaatccggcagactgtctgctcaaggactttccgcaagcatccgtccttcccataccgggacgaggacaagtggccatcgaatttatgcaaggaaactcaacatgcaagggaacttaaaatgatagtaacttaaagttatagtaacttagcaatataattactacttttgtagcacaacgtgcattaaccatttccgatgaacaagaaatatacagccgaagagcttgatttattacatgccgaactctacgacatattgggagaaaccatccgggtgtgtcagaagcacaacattccctattttgtgattggcggcacggcaatcggtgcactctacgaccaagcggttctcccctgggatgatgatattgacataggcatgacgcgggagaactacaacaaatttctgaaagtagctcccgaggaactgggtccttcctacttcctttcatggatagagacagaccctcataccccgtattattttgccaaagtcaagaaaaacgacaccctttttgtagaagaaatgttcaagaatgtcccgatgcatccgggcatttttgtcgatatattcccattcgacaaaattcccgacaacaagctgctgcgaagaatacaatccgaagcactcggcttcctcaaatgctgcctgatgggaaaagagatatggatgtggaaacacttcggtacatgtgaaatagagaatcccacgaaccggggagccttctcctgcttcctgaacagggtagtcgacctgcttttctctaaaaaagcaatctaccgcatgctggtgtcagttcaaagctgtttcaactcacgaaacacccgttactataacaacgtaatggccactgccgaccacgtaaccgtagaaagcatccgccacctgcaacccgtgaaattcggtcctctcacagtgaccgcccccgacgacctggaaggatttttgcgttacaactatccaaccctgcatcgatttacagaagaagagcaggaaaaagtgaacaaccactatcctgccgccctgtcattcagtacaaccccaaaacaagaactatgaatatgaaatccgctttagtagacgtcccggtacttatcctgttcttcaaccgcccgcaacagttgtcgcaagtgttcgagcaagtgaagaaagcgcgtccgtcccgcctcttcctctatcaggacggagcacgaaacgaacgtgacctgcccggaataaaagcctgccgtgaaatcgtatcacagatagactgggaatgtgaagtagaacggctttatcaggaaaagaatttcggctgcgacccttcggagtacatttcgcagaaatgggccttttcgaaagtcgacaagtgcatcgtattggaagacgacgatgtgcccgccgtctcctttttccaattctgcaaggagatgctggataaatacgaatatgacacccgcatcagcatgattgccggatttaaccccgaagaaatcacccaagatatgccctatgactatttctttaccaccaccttctctatctggggatgggcaagctggaaacgggtagtcgaccaatgggatgagttctacaacttcctggacgactccttcaatatgcaacaactggaacagcttatcaaggaacgcaaattccggagcgactttatctacatgtgccagcgtcaccgggaacagcagaaagccttttatgaaacgatcttccacgcctccatactgttcaactccgggctaagcatcgtgcctacccgcaacatgattaataacttgggagcaacggcagattccacccatttcgccggctcgattcataccctgcccaaaggttaccgccgcatcttcacgatgaagcgctatgaggtggattttccactgaaacatccccgctacgtcatcgaaaacgttgcctacaaagagagcgtttaccgcatcatgggctgggatcatccgtggatcaagatcggacgttcgttcgaagaactgttcctcaacctgaaatacggcaatttctccatcattacgaaagctgtcaaaaaccgaatcaacaaatggctgaaaagaaacaagcaccactaaataagttgcttactatttatttttaccatacccgcctcacacgggaaagctacgaggaatggaaagaatataaattccccggacacattttatacggacttcctttactggagaattacggaatacactccgtgatgcacaaatgcaaatatttctccggccgtctgaaactcatgctttacgccaccaaagagattctcttctgcaaggagaaatacgacgtcctctacgccacctctttccggggtatagagcccgtcatcttcctccgtgccctgggactgtatcgcaaacccatcgtgatctggcatcatacggcagtcgtgaccaatcccaaaccgtggcgcgaacaaatctcccgccttttctacaaaggtatagaccaaatgttcctgttcagtcggaaactgattcaggactcgcagaaaacccggaaagcaccgtcccacaaactgaaactcatccattggggaccggatcttcctttctacgaccacctgcttgcagaaatgcccgaccggaagcccgaaggatttatctccaccggtaaagaaaaccgggacgtagacaccttgctccaggcatttgccgcaacgaacgagaaactggatttgtacattgccgtctcatgcggtaacatcaactataaaaagatcatcgacccgtatgcattgcccgactccattcgcatccattataccgacggagtgattccctacgaactggggaaactggtggcacgcaaaagttgcatcgtgatctgctgcctggacttcccctataccgtaggactgaccacgctcgtggaagcattcgccctcggcatccccgtcatctgttcgcgcaaccccaacttcgaaatagacatcgacaaggaaggaataggcatcaccgtagaatataacgacgtacaaggctggatagacgctatccgctacatcgccgaccaccccgaagaggcacggcgcatgggagagaatgcccgcaaactggcggaagaacgtttcaacctcgaaatcttttcacgcgaaatagcagaaagcttgctggaaatatcaaacatttcctctaaaaaccgtacatttgcataaacttttgcccatgagagtcctgattataaatacatctgaacgaataggaggagcagccatcgcagcaagccggttgatggagtcactgaaaaacaacggcatcaaagccaaaatgctggtacgtgacaaacagaccgaccaaatcagtgttgtccgcttaaaaagtaactggttgcaagtgtggaagttcatgtgggaacggattgtgatctggagtgccaaccgtttccggcgttaccatttgtttgacgtagacatcgccaacacaggtacagacatcacctcactcccggaattccgccaagccgacgtgatccatctgcattggatcaaccagggaatgctctcactgaacgatatacgaaagatactgacctccggcaaacccgtagtctggaccatgcacgatatgtggccatgcaccggcatctgccattacgcacgggagtgcaacaactatcagcgggaatgtcacgactgtccgtacatctacaaaggcgggggacgaaaggatttatcctatcgcacgttccgcaaaaaacagaagttatacagctacgctcccattcatttcgtcacgtgcagccattggctgaaggaacaagcccagaccagtgcattatttgaagggaaaagcgtgatcaatattccgaacgctattaataccaacttgttcaaacccatgaacaagaaggaagcgcgtgccaaattcatgttgccggaaggtaagaaactagttttgttcggctcattaaagatcaccgataaacgaaaaggggtcgactatctgattggggcatgcaaactgttagcagaaaagcatccggaatggaaagactcactgggtgtagtcgtattcggcaaccagtcgcagcagttacaggaacaacttcctttccatgtatacccgctcccttatatcaaaaatgagcatgaagtagtgaatatctacaatgccgtagacctcttcgccatcccgtctctggaagagaatcttcccaatatgattatggaagcaatggcctgtggagtgccttgtgtcggttttaatgtgggaggtatccccgaaatgatcgatcatctgcacaacggctacgtggcacaatacaaatcctcggaagattttgccaacggcatacattggatattgacggaaccggaatacaacgaactctctgcacaggcctgccgcaaggttctgggtaattattcggagagtatcgttgcaaagaaatatacagatgtctacaataaaataacggggaaatatgcatagtgtccatcctactcccaagttctctatcattacggtgacatacaatgctgaaaaggtattggaagacacgattcaaagtgttatttcacaaacctatcatcatatagaatatattatcgtggatggagcttccaaggatggaaccctctctattatcaaccgctaccggtcacgcatacacaccgtcgtcagcgaacccgacaaaggactgtatgacgctatgaataagggcatcgcccttgccagcggtgattatctctgtttcctgaatgcaggcgactgttttcatgaggatgatacgctgcaacaaatggtgcacaccatcaacggcaatgaactgcccgatatactttacggagaaaccgctatcgtagacaaggacaggcatttcctgcggatgcgcagattgtccgcccctgaaacgctcacctggaaaagtttcaaacagggaatgttagtctgccaccaggcattcttcccccgccacacgctcgtagagccatataatctgcaatatcgcttttctgcagatttcgactggtgcatccgcatcatgaagaaagcacgtactttgcacaatacccacctgacaatcatcgactatctggaggagggaatgactacccggaatcagaaagcatccctcaaagaaagatttcggatcatggcaaagcattacgggctgattggaaccgtggcgcatcatgcatggttcgtgatccgtgcagttactcaccagtaggcgaaggcatataaagcatcacctggtctaatatcactccttcgtccaatgccttgattaccaatttgtgggacttctttccggataccggaagtcgaaccgttcggatggcttgattgcgcagcacgttctctttccattcttcactccgtcctttcgtttcataagagatcacttcaggcgctgcatcgtccaacgatattgagaaacgtaattgatctcctctcacaggatgattaggcaacaagcggatgtcaacctctaccgagtctgttttccagttgtcaaaagagaacatcagtgcatctcccttgtcaatgcctgtcgctttgctttcatatcccaggccctcacaaatagcagaagttcctttccgcgcattcaaggtcttactattcgggatattcttcccatccaagccgttccatttatagatagctacacgctctttcatcatcggagaagtagccgtttttctttccacgcgattgaatacggggagttttcggggttggaaatccatcatgcggttccactttccatcttccagtgagttatactgttttgtcaatactacaatgctgtcataggcaagatcacttttctcccagtccgcttttccgtggcgggctaattgggcatatagcaatttccggttcatctgtgtagcagcttgcaccgggtatttcaccaattcaaaataggcactttgtctgccggatgggattttcaaagctgcccgttccactgtctccgacaatttatcataagcctgcaaacgtccgttgatttctttttcactccatgggagatctttgacaacacgataaacaggatctttctcctcttccctcgtatttcccataaattcaggtttacgaatatgggccagacgatagtgttcctgcatcacaggtaatactgcctttgcgcacgaagctcccaattcccgttccagccagtgtttcagatgagaggtcactccttccgaggccacagcttctatattccaggccatatccataaacaactctatctgatactcggcaggcttgatatctccgacattcagtatccacatcttctgtatgcctcgatcgtaagccagcttcatttgttggaaaatcagatacgggctcatcgtactcaaccagagatggtcgtgcggacgtccccaataagaaacatgataatagactccattccctcctttacgtgcgcattcttcggccgtaggaaaatggcggatatagccatagttatcgtcacaccacatcaatgttacatcatcgggcacctgtaatccggcatgataaatgtcgagtacctctttataagggataaaaacctgcgggactttagttacatccttatcaacatatttttcaatcaacccgcgttgatctgcaaacacacgatctattacggccttctgttcttccaccgtcttcgctccctgcatcttgccatcgtgtacaccacgcatacccaacgtatagagtatttcctgatctgccacctcttttacacggtcttcccagaatttgtaaacagccggagcattattcacataatcataagccccttcccctcttcgtttccactcgccggcagcgctgcaagccatcggttcgcaatgggaagcaccgatgaagattccatatttcttggcagcttcccgattgcttttggtcaggaagaaaggaagtgtacattcgtgcattgcaggccaataggtgttggcacgcagacgaagtaagagttcaaaaatacgctcgttggtacgcgggcctatctcacctttcacttttgaaggttcataggtccgactgctccatggcatcaagccccagtcttcatcattaataaatataccccgatattccaccgaaggagcctgaagactttggaatttggaagatagcttaaaaagtttcttcttttccggagttacgtccgcccaccattcccagggagagacacctaacaaacgggatatttcgagtattccataagccgtaccatgtttgtcactgccggctacgatcaatttaccctccggagaaacagataatagaaaagcctgcttcttgccttttagcgcagaaacatctatgccggtccggctgataagctcactctgccccaccgttcctatcacaatttcacctgttttctcattcgcttgggtagtcgacgacaatactgtctgaatatcacgccccagcatttccaatgcggttcgtacaaccagttcttcagaagggctgcaagcgatgacaactgtttgaccggaagtcaaaacaaaatccttactacgaatcggtaaagcaactatcaaaaagatgaaaaaagaaaacagaagtttatgtctcataggttctattatttatagaagacaaaattacaggtttgcagaaaatgtactatagaatagtgtacaatttcatagaattctgtccgacctatttaaaatatagcaggcaacgcaaacaactgatacatcagcgttcgtgccatgcgtatctgtcctttcgtgctgggatgcaaacggtcatatcccgcatcatagaaataaatcagttgttcttccaccatcggattcaatccggttaccgcattaaaatcaatcacggggactccccacacattgccggcttctttaacagcctgcacgtaggcatccacatattcgccacaactattctggtagttttcatccggttgcacattcgtttctccaaaattggccagtgaacggtgcaacggggtcagcaacacaatctgcttgtccgggaagagttgtttcagtctattgattcctatgttgatacgtcccttatacgtgcttccatccattataggagtgcgtttcttacgggtttccagcttttgggtttgcccacgggctgccatcacttgttcttctgtttccgtaaaccattctccaataggtacaccgtcattaaaatcattcgtacccatcaaaatcacgatagcatctacttctccaccgtgttctttcttcagttgctcggcttgccggggcacatcattccattgcctgccactgataccatatacataaggagtgattcccagccattcctgcagaaaatcccagtatttctttatcttgtcaccataacagttgggatctgtaatagagtctcccaaatatcccactctttttccttgccacgggtgccggatgcatccattattcgtttcaacagagtttgccactttagaagattgattctgtccgcacagaaaagaggaacagaaaaacaggatggtacatgtgagtaataatttgcttttcatcggtatcatacattaaatgagagatttgtatttaatattcgacaaaaataactcaaaaaaatgtagtttcaatcaatttggacgatcaatctcatccatgcaaccggatatataaacatattcctatttgactattcttgctaaaatacaggtttacagtcttttttcaatcaagttatcattgagttttgcagctaaaaccctatctttgtcacaaactaaaagaaataattggatgtttaactcattttcattccataaggattccgttctgtaaataatctgtaagccttcctctcattacagattatcccttatgttttctgacatactcttgtcagagttattttctatatctaaattttcaaactatttgtatggtcaaatggttgcaagcatcattatatgcctccattcgccgtacaactaaaacattaaaacaatgagtaacgattttaaatcaatccacgaattcgattttacactgatatgtaattacttcaaggcattaaaacgtcaaggtcccggaagtcctgaaatcacacaaaaagccgtaagcttcatcaacgaactgtccgacaaggcacgaatagccgacattggctgtggcacaggcggtcagacaatggcattagccaactatacgaaaggacaaattacaggtatcgaccttttccccgactttatcgagctattcaacaaaaatgcaatagaagcccattgtgaagacagagtaaagggtatcgtcggttccatggacgctctgccatttcaagaggaagaactcgatctgatctggtccgaaggcgctatctataacataggattcgaacgcggcatgaacgaatggaacaaattcctgaaaaagaacggatttatcgctgtaacggaagcctcctggttcaccccggaacgtccctccgaaatagaagacttctggatggccaattacccggaaatcgatacgattccaagaaagataatgcaaatggaaaaagcaggatatatcccgacagcccatttcattttaccggaaaattgctggcttgagcatttttacgctccccagttccctgttcaggaagcttttttgaaggaatatgcaggaaatgacgcagccgcagacctcatcaccgggcaacggtatgaagagagcctatataataagtataaagaatactacggctacgtattctatataggacaaaaaaaagattgattatctgccggagaagttagcaagataggacaactctccggcatttattatcctttactttgcagaaaacatggagacgaaagatatcaataaacaggaatatcagttacggatcaataaagtgaccgactatattcacaatcacatagaccagccgttatcattacagaaaatggcaggtatcgcctgcttttctcctttccacttccatcgcgtatttacaatcctgacgggcgaaacgcctacggattatatcaaacgcactcggattgaaaaagcagccctattattaaaacgaaacaaggaactttccgccaccgaaatcgcccgtctttgcggctttagcagcctttcacttttaagtcgcaatttcaggttacatttcagtatgacgatccgggagttccgttcattaaaataaaaccctaaagaatatggaaaaagaaaataagattctgatttttcgaacttctatcacccaaaggcgtgacatcaagcgcataggagagcttttggcagagttcccccaaatagacaaatggaatgtggactttgaggactgggagaaaatattaagaatcgagtgcagggatatctctgcactcgaaatatcggaagtactccggaacaatcatatttttgccaccgaactggaataaaaccgggaaaagaaaacctctcaaactcccaacaactgtttcaattcagccactccttcagaagctcccttctgaattacatgtatcgaacgggaagtatgcgtatctaccggtttcggatcaatcagatacacctctgctcctctcggtacataatgaagcagccccgccgcaggatatacgttaagcgacgtaccgataatgacgaaaatatccgctttctccacatattggatggcggtttcaatttccggcacagcttctccaaaccatacgataaaaggtcgcaattgagtgccgtcgccggccttgtctcccatcttcacttcatattcttccggtttcagttcttttatgtagtggggattatgaggatctctgctggaacacactttcgtcagttcgccatgcagatgaatgatgtggctactcccggcacgttcgtgcaagttatcaatattctgtgtcaccaccgtcacatggaagcttttctccagttccgccaacagttcatgcccacggttcggtttcacctccaacaactgtttccgacgctcattatagaaattaatcactaaagccgggtcacgctgataaccttcaggagtggccacctgctccacaggatacctatcccacaaaccgcctgcatcgcgaaatgtactaatcccactctcggcactcatacccgcacccgtcaaaactaccagattcttcattactattcctccttcttttttaatagccacacaaatgtaatcagaatcatcgaataaaagaacactttctcacgcttaatataatccaatttatgcagaactttaagatgaaagatgcagatagttagcatcatttatggcaacaactattcgtctgactactgttattctttcgtctgacagttgtcagacgaaaaaacaacaattgtcagacgcaagttcaacagctgtcagacgattaattacctgcataaacaaatctaaattataagaataagccgattaaatcctacgaacaaaaaaactaattctttaaagaaaagcgattatctttcacagatataagaatttttaaatagcaaatgctaaatcattcaaataaaacacgtacttttgcgattcataaatttgcaattgattgaaagctaaaaccatgaaggtgatacatttcaatcgccaacaaaaaacattatatggataaattcagttactctattggcctcggaattggtcaaaacttatcaagcatgggaatcggaaaccttgcggtagatgatttcgcacaagcaatcaaagacgtattggaaggcaatcagacggctatcagccacaatgaagcccgcgaaatagtaaacaagtatttcgaagaactggaagctaaaatgggtgccgttgctatcgagcaaggacaagctttcctcgaagaaaacaaaaaaggaccgggcgtagttgttcttcccagcggactacaatatgaaatcatcaaagaaggtacaggcaaaaagccgaaagctaccgaccaggtaagatgccactatgaaggaacattgatcgacggtacactgttcgacagctctatccaacgcggagaaccggctgtattcggtgtcaaccaagtaatcccgggatgggtggaagctttacagctaatgccggaaggttctaaatggaaactgtatattccgtcagaactcgcttatggcgcaagaggtgccggagaaatgattcctcctcacagcacactcatttttgaagtagaattactcgaagtattataaataaaaaatttcaaagcaaaatgaaaaaagttagtatttttatggcaatcgccgctgctgcaagccttgcttcttgtacagctcaagctcctaaagcaaatctgaaatcagacatcgactcactgtcttattctatcggtatggcgcagactcaaggtctgaaaggctatctgacaggtcgtctggacgttgatactgcttatatggcagacttcatcaaaggtttgaatgaaggtgcaaacaagactagcaaaaaagacatcgcttacatggcaggtctgcaaatcggtcagcaaatcagcaaccagatgatgaaaggtatcaaccaggaattgtttggcactgactctactaaaactatcagcaaagaaaacttcatggcaggtttcatcgcaggtactttggaaaaaggcggtgtaatgactatggaagcagctcaagaatatactcgtacagctatggaaactatcaaagcaaaagctttggaagaaaaatatgctgactataaagctgaaaacgaaaaattccttgctgaaaacaagactaaagacggcgtaaaaacaactgcaagcggtctgcaatacaaagtaatcactgaaggcaaaggtgaaattcctgctgacacttgcaaagtgaaagtgaactacaaaggtactttgattgacggaacagaattcgacagctcttacaaacgtaacgaaccgtctactttccgtgccaaccaagtaatcaaaggttggacagaagcattgactatgatgcctgtaggttctaaatgggaactttacatcccgcaagaacttgcttacggtgctagagaatctggcaatcaaatcaaaccgttctctactttgattttcgaagttgaactgttgggcatcgaaaaagataagaaataagaaagttcttttctaaatagaaaaaggaaagaggtgcaaaacgtttgtacctcttttttttgctttttcctattttttttctccgaaaagaagaataattaaaataaatctctatatttgcttactatttgataacaacaggaaattacaatttattattatggaaagaatagacaacctcgacaggcagatcctagagattatctcccagaatgcccgcatcccttttaaagacgtagcagccgaatgtggagtgtcacgcgcagctatccatcagcgtgtgcaaagactgattgacctaggtgtcattgtaggctctggttaccatgtgaacccgaaatcattgggatacagaacttgtacctacgtgggtatcaaactggaaaaaggctccatgtacaaatctgtcgtagcggaactacaaaagattcccgaaattgtggaatgtcatttcactacaggtccgtacacaatgctgacaaagctttatgcatgcgacaacgaacatctgatggatttgctgaataacaaaatgcaagaaataccgggtgtggtagctaccgagacattgatttctctggaacagagtatcaagaaagaaatccccatccgcgttgaaaaataattgtgatggaatttctaaatgaatatcaccttgcggggttattcatcggaatatgtacctttttgattatcggcctttttcaccccgtcgtggtaaaggccgaatactattggggtacaaaatgctggtggatatttctggtactcggcatagccggtgtggtcgcctcattaagcatcgataatgtgattttatcttctttgcttggcgtgtttgcattttcttccttctggacgattaaagaggtcttcgaacaggaagaacgggtacaaaaaggatggttccccaagaacccgaagcgcaaatataagttctaaaaataaagtatcgtagttttttatcaaaaggatttgcataattcgagggaaaatactacttttgtcaccgcatccaacaaaggatacatcggacttgtagctcagttggttagagcaacagactcataatctggaggtccctggttcaagcccaggctggtccactgaaaattcctgtaagtgcttcacttgcaggaatttttcctttttatagccatcctccaactagaataaaagataactaattgttcccaaacaggtaaaaacaacagcaacggacaaagcagaaatggcgaagaataagcaataggggaataacacctataatattaagctatagagtacccaatattaaataattccaaaatgtttcagcgctttacaaagcccgtcattctccaccgtatcagtaacaaaattggctgaagccttgactatctccgatgcatttcccatagccactccgattccggcaactttcaacataggaatatcattaccaccatcgccgcaagccattatttccgtcattccgatcccataataatcagcaaataccgaaaggccggttgctttacttattcctgccacatttacgtcagcaaataaaggatgccagcgcgacaaggaaagattaggcagaaacgacatcactttttgttccatctcatcatcgatataaaaacaaagctgacaacactctttcttttcaaacaggttttcaatgtctacaacggtcgggatagggtgttccacgattttagcaatctgttcgacagtcggagtcagacgattaacaaacacaccttcatccaattcaatagcgactgcaaaatcaaaggtctttgctatttccatggctttcttaaaatcatctttcggaataaggtgctttcttatcacggtgccatcccgcaaaacacagtcggcaccattcaatgcaataattccgtcatacggaacatcagctatttcatgaaggtcgcctgccgctctaccggtagcaatgactattcgaattccaccgtcatgaatcttcctaagggcatcaacagaggatggcaacactttatgagtttcaaaacttaccaatgttccatccacatcgagcatgatcgcttttatcataacatttatatctttattcattcttcgacaatttagagaagcaaatcgactatccttgactgataagtcagagcagtcaattaaatagtgacaaagttactgaaaaaattcccataacaaatacaaacctccaacacataaaataaaaaaggcaaaaggaaacgagatccttttgccctatacctattgataccaactgaaaattgatagtaaacgtttagcggaagtcctttaattcttcctgcaatttctgacgggtaaagaatatgcggctctttacagtacctaacggaagattcagcttttctgcaatctcacggtacttgaatcctgaaacatgcatagcaaacggaactctgtattctttcggcagagcattgactacgcgatgcatttcttttaaatcgtaagctctttccgtactttcaaaacctgaatcttgtggcaggttaaggtgatagaggttttcagtctgatcgacaaatgtctgatcgcgcactattttgcggtaattattaataaagatgttccgcattatagtatacatccatcctttgaaatttgtgtcgggggtatatttatcttcgttatccaatgcttttaatgaggtttcctgtaacaaatcgtttgcttcttcacgatcggttgtcagtttatatgcaaaacggagtaattcatcctgtactcctatcagatctttcctgaagcttaaacttttcatatacgttatttttaaattgtgagtattcgttatcatcatttcgatgttgcaagtttacgcgttttcaacaaatgtggcaggtgaagaacaaacattgtttaggggaaaatctatcagttgatagaatttaggtcatttctgatagtattcaggtggttttgagactgtccttatagcgaaaatcccattttgaagtcacacctgactcaaaatgggataacacaaacaaaacaaacaatattagcgattttcacaaacagctgtctttttcatctttaaaaattcataagacttaatttagaatctgttactaaaacattctaattatgggaacaaaagtattattttccggcaaaaaggaacgtagaaattaagaatagttataaataatagttgttttatgtataaaaaattgtgcctgactataaagaattgtatttaatatttgctgccaaaagaggcataaatgcttcatttgacgatattttataatatcagtattccaaagcgatgtaaattctcctacttctttttttcactaagaattaatttctatatttggagaatatacaaccaaattcagatttactatctatgactgataccatctcttaccaatatgcagctccttccgcactgcaacggtcagccgatcaggacgaactgtttcttgccaaatacagcgaaatagaaaagaaagaagcaccctgtttcttttggggaaagttgacacaaccctacatgacagcacgctgcctcatcgcattatccaatgttgtgcagtccagttttaatctgacaccgtcacagctttccatgctgaaagatccgattgtaaccgcaggaaatgaccgcctgcgttttgaaggattctctaattgtgcaggtgtatatgccagagtcgacgtgcttcctgacggacacgacggagaatttctggaaaacgggacaacaaacgtagattttaatcccggaatgatttctgccttaggaggaataggcagacaggagaatatggtaatgtcggtcggttccaaagaggtgggactttatcataaaggtgagaaagtgatagaacgaaaagtacctcttcccgtgaaatggataaaagggctgactacagtacagatttatcaatccgttgcggaacagctctactccttcaatcgcatacaaaccttgcaactcttccagactcttccgaaaagtagtgtgaaatgcgactattatttagtgatgcgcggtcaaaaacccgccttttcaccggtgaaaagcatgaatgccgtctgcattggaggacttcatcgcttacgtctactcgagcccttgcttccatttgccgatgagctgaaagtctttgcgcatcccaccatgcaatctaccatttggcaactttatttcggtccggtacgcttcagcctttctctttcccgcgaatgttggagaggattttccggagaaggcgccgcactggaatctctgctcgaagatgtccccgaaagatggatagaagcaatggataaatacagttatgccaaccaacagttcaaccccactctttttgccatagaggaacatattgacctggagaaggtagattccctcgcggcacggctggcagccatggggttattaggattcgatttggatgaaaacagcttcttctaccgtcgcctgcctttcaaaaccgaacgtattttaagtctcaatcctcgaatgatagctgcagaaaaactactggaagaagaaaaagtagaaatcatatcgaatgacgagaaacggacagaagcacgcgtggcaggaagcggaggtgtcagacatacggtcattctcgacagagaaagtgagaaggagcgttgcacttgcacctggttcagcagcaatcaaggagaacggggagcttgcaaacatattctggcagtaaagaaactagtacaatggaagaactaaaaaaagaactcgagaaattatccaaggcttatgtggatactccggagaatgaagagaagatattaatcccttttgtcaaaagattactggagttaccaatgaaagaaaggcggaagctgctgccggttatccgggatttacaatggataaaaagtaagtttgccggtttcagtagtgagacaacctgcagtgcggcacgggcacattttctatccgctgttcagtttgtctgcgccaacaaacgagagatggatatggcatatcatgtaaagtttgatatgctttgcaaactactcccactttactgccccacctggctgatggattttatcaatgatgacaaaacttggtttaatttcaatctcaattacgaacagctgatgcagctcatggatatgggatacctcaaagaaattgctccaagccgcattgcacatgtactctcctggattacccgcatcagaaataaggaacccaaaggaaacgatactttcaacagtgagttattactcaagcgggacatcaccctgaaagaacatatctggacgattttcgaatacgaatcgtccatcggctatcaagatgattgcgccaaagaggcttataaaaaaggagttaccgcacgggatgaaagtatcagtgccgctctctaccgcttttcgctggacggccatctggatagagaacgcctattaaaagccacactcaccaccttccaccggagtttcaaaaaagatatggcaggatggtttgccggattcttcgaaactctgcaaccaactaccggagaactgttatccttgcaagaagagatgatgcaaatattcacctcttcctataccaaaccggtgaacgtaatgttgcaacagttgaaaaatattgcatccgaagaaggattcctttatcaggaattcatcgaacgtgcaaccacccttttcttctccagccccaaaaactcgctgcttaccatttacgccctctttgaaaagatcgtcgcacaacatcccgagatgaaagagccctgctgcatcactctctgccaactcttcttgaagaaagacgaaagccttcaaaagaaagccgctaattttatatcaaaacatggagacgcctcttcattcaatctccaggaaacactgcaatcttgtcaaccggagatgtttcaaagcgtgcatgcgatactctcttctttcaaaccgcagcctacagaagaaacccatgagcccgatgcaagtgtgggagaaacggtacacatctgcagggaagacaaccctatttccttccccgccaacaaagaagatttcctgttccagcttagtcgtttgttcgacatggaggaaagttgggagatagaaacaaccatcgccgccatcattgctttccatccccaattggacaaagaagatctcaaccggatggaacctgttttccaacgggctgccactatcgttgccaatagctgggagccatacgaagatcttctcgctaccttcctactggaatatcaacgtttatgggcacagaaagatacctccaacacaggatttttgagaaatatgttcacccgactggaagaaaggctgaaaggaatagatgaaaacagaggagcttatgacgagcgctctttcaaacgacttgccgactggaaacccggctacagcaacgcaacctgtttcacacccatcaaacatttatggctaaatgtgatccgtaaaataaaaggaggcaatgccttccccctactttctactcccacccataccccggcatacgtacaggctaccgaactggtacgccggcttgccgtatatcagaaagcagaaacgaaaccctgtccatgggatttccagctagctattgcccgatgtgctatggaagacaaagaagaagccatcgccaccgcccggcaactgttgcaagatgaatacctgcatctctctctgttcctgttggatgaaaacacgctacccgaaccgccctacaatcatccaaccgcctggatggccgccggactggtaaaagcaccggagacggaattcgaagcattcaaatctttcgcctgtaacacattaccacacaactatctgacaggagactacgagtggaaagaggtgaaacccaaagagaaatcatacgaaactgacaggcgtctgctccaactcgagttctacaaatggcatacatatactgaatacaacagccgccagttatggcaggaacatctgattatcaacagtaaatataacatggatgattcccgttacatggaacctctgctatgctgtttccccaaccgcccggaaccattgatagcccagattatcacttgctacatgactttcggcactccgcaggaagacagcaaacgcaccctcgcctgtgccttgcgcatgctgttgtctttccactgcccgctcaaagagatgagtttgctcctactaagtggttcgctgctttttgtagacaaaacagtccgttcctatgcagccgaattatgggtagaaggagtatccacaggaagaataaacaatcaccggataggagaaatcctggcccgcctcatccagatggaacttgctccgctaaaacgcttcaccacccaagtgtacgaaagcatgtacaaacgaagtactttccacaaccagcaactggaagcactgctcacagaatttataggcggattgcccgacaaacccgttaccggactcaaacaactgctcgaactttatctggagctattgaccatcaaccacagcaaggttgcagacgaacaactcctgcaacgcctgcaagaatggggcacaaacagcaacctgaaaaaagtgacgacttcactcaacaacctataacaaattcatgattatgaccatagaagaacgcctcaacgagatagtagaaaaaggacaaggcgatgccatcatcccttttctgcaaggattaacgcaggaagaacgaaaaacacttgttccctgccttaacaaattggaagagcactacaataagttcgtacaacttaacgagaacacatacggtacacgcggaactcccgaacagcatcgtatcatcaatcttaccgccctcgtcatctattcgctaaaagaattccgcaaacacgaatggggaatctatacggaacagctgaacgaattgattccgtggtgtattccttcctggctcgacagtttcttcaaagagggtgaaagcagggaatttggcggtttctatggaatgaattacgaaactctgatggattggatagaacagggagtactcaccctaacaccctctccgcaaaccatcgccggttatctggtgaactacatgaacaataccgatttcctgcaaaagcgggcaatcacactcaaagaacatatctggtatctgttccaatacgattgcggacaaaactggacggataatcgtacaggcggacagccttatttctctttcagatacttcgtagaacacggtcaactagatcgtatgcgtgtattaaaagaatctctgcttgccgtcaaccggaatctgaacaaaaacctaagcagttggtttgcaggcatgtttacagcacttaaccccagcacagaagaacaactgacactacaaccggaaatatttgccgttctgtccgcccctcacagccgtccggtaaatatcatactcggactgctgaagaacttatgcactcacccacaattccaggctgaagagtttctaagtcagacttccgtgctttttgcttcggacgtgaaagcgattcaccaaaacacactggcagtactccataagctggcaaaagaaagaaaagaacatcgcgacactatctgttgtgcagccgcacaaggactgatgagccgggaagaatccacccaaagtaagatagtcaaactgattcagacgtatggagagacggcatctaccacattaaaagagatactttccatatatacggaaaccatgttggctaatactaaaaaggagctgaaagcgtatttggagaataacgagccggaagattccgcctctttcacgtatgagccaatactccctatcatccgtgaagacaaccggatacaggaaatcacttccactgaagacctgatatttctagccagccaagtgctcgacgtgaacgagatctatcacttcgacctgttactcggagccttagtggaatgggaccggcaacaggaagtaaaacaaatctctcaatggacccctattctccaacgtgcctacaaattgctgatgagcggaggaagttcccgaaacggtatattagaccagttaatggccaccttcctccttgactatgccaaactgctgattaaacgtttcccggaagaagcccaagagctaagcgacttacatcagaaaatggtacaaaaagacgaacttcaaaaaggcaaatgggggtatcgtaatctgcaaaaactcaccattcgtgaaaaaacgaacaaaaaaataaagttccccgttcataagcaactgttatgccggacattagaccttctggaaagcaaagagaaacctttgcccctattgtccactcccactcacacaccgatgtttatcgctccggcaaccctgatagaaaggttaaaacaatatcaacaagcaaatgtcgaaccggacgatatggatatgcaaacatcactatcacgagtggcactgggaagttcgtcgcaagagcttcctctgctcctccaaagtttgaaaggagaataccgacacctactcacttttttgctgggagaaaaagatgtactcccccaaccacctttcaatcatccttcctggtggatgatggcaggattaatgaaatcaccggaaacaatctattctgaatttaaagacttctcttacaataaaagtccacgtgaatttctgactggaaactttaaatggagaacctatcagtatactgactcgtacacggattataacaagaaaacagtagaatggctttgttcaaatcttactttcgatattccggaaagcgagaactctcatatcatcaataaagacaaatataatgaaagagtcagttactattcatacgatccgcatccgttactggttgaaatgtacccacagatagaacgttttgacgacatacagaacgacttaccacgtttggcatggttaactcccaatataccggagccactattggtatggtgcatccgcagtgccatatacgccccgacgttaaatgaggtaagggaagcaggtatcacccaagctgctattgaagcgcttcatcagttaaggcatacatggcacgaagtgtcttatctgctggaagccacttgcatgctggtatccgataaaacttcccgttcctatgctgccgaaatctggatagagcgtgtaggtcaaggctgcataaacagtggacgcataggcagcatcttaagctcgcatcaacataccggctggggaccgctgaaaagactcactgacctgatacagcaacaaatgataaacgtcagtccgctgcataaccgggaattggagaaactaatcgtggcaatgttggccggacttccagaaaagcctgtcaaagacttaaagaaattactggaaatatatgcggagctgttatccatcaaccatagcaaagccgaagacaaacacgttttgcacctgcttgacgcatggaaaggagtgcccaatctgaagaaagcagtggctaatatccaacggtaagagaggtagcttattggagctaaaaccaaaaagaagtatctttggcacactaaaaacaaaaggttgaatgattattctaaaatatagtttagctattttctgtttactgctgacaggatgctccttcttttccagtcataaggaaaaggagagcactcccctcatggaatacgaacaaacgacggaggatatacaaccacgcgaagaatgttccaccgtttcaccaccggagcgaagcgaaatggctctctacatggactcattaggactcgtcaatatagctgacctggatagcagtctcgttgtaaaactgatgtatacacaggctgataatttcacaggcgaagtgctttacgacaacttaacggaagcctacctacatccggatgcggcatacgctctgatagaagcacaaaaagccttaaagaaactacacccgtcttatagtcttatcatttacgatgcggcgcgtccaatgtcggtacagaaaaagatgtggaacgtagtgaaaggaacgtccaaatataaatatgtctccaaccccaaccgtggaggcgggttacacaactacggactggcagtagacatcagtatccaagactctctgggacagcccctaccgatgggaaccaaagtagaccacttaggcatggaagcacacatcacagacgagatcggattggtacataatggaaaaatgagtgaaacagagcgtcagaaccggttactgctacgaaaagtgatgaaagaggccggattccgtgcattacccagcgaatggtggcatttcaatttttgcagccgggacgtagccaaacagaagtataagttaataccataaccgacactcaacaaccccataatcagagctcgacgattcattgtaatatcctataacacaataacaccatgatgcaaatctctcctgaaacccaactttttattcgcgaacattcatcggacgatgtacgtgtgctggctttacaagctaaaaagtacccggatatagatatgccaactgccatcacccaaattgcaggaaggaaggtagcagccgaaaagattccctcatggtgggagatcgaaaagatatggtatccgaaacatctgtcgctggaacaatgctcttcagaaatcaccgcccgctacaaagcacgtcttttgcagggagattctctgaccgacctcaccggcggattcggcattgactgttcttttcttgccaccggattcaagtccgccacttacgtagaacgtcaggaggaactctgcgaaatagcagcacataactttcccgtactgaatctaaaccatataaacataaaaaacgaagatggagtaacctacctgcaagcaatgtcccccgtagactgccttttcctcgaccccgcgcgtcgcaatgagcacggcggaaaaacggttgccatctccgactgcgaaccaaacgtagccgaactggaagagcttttacttcaaaaagccaaccgggtaatgataaaactctcccccatgctcgatctttcattggcactgaaggagttgaaacagacacaggaagttcacattctgtctgtcaacaacgaatgtaaggaactacttatcctactcggacaaacatcaccgacagaaatctccattcattgcgtgaacctctccacgaaagggactcaagaagaacaacactttgtattcacccgcgaacaggagcaatgcagtgaatgtacatatacggattctttagaaacctatctttacgaaccgaatgcctcccttctgaaagccggtgctttccgtagcattgcagcagcttaccctgtccgcaaactgcatcccaatagccatctttatacttccgatactttcattgaaaacttccccggaagaatattccgtattgtcaaccagtgcagtttcaataaaaaagaagtaaaggagaatctggcagacctgaaaaaagcaaatgtaactgtccgtaacttccccgccacagtagccgaactccgcaaacgaatccatttggctgaaggaggagatacctacttatttgccagtacattaaataatgggcaaaaagttctgattcgctgtgagaaagtctgaactattttctatttttgcaaaaaagaaacacaatctaaactaatccagatgaatcaaacactcataaaagccattctattactaatcgcattcaccttgtcctgtcacactccacttttctcacagagagattttgagcgacacgagttctcttttcacgcgggctacggtgttatgttccatcaccctcctacactcacgttaagtacccatagttaccaacgtacactcgcacaaggcgtaagctgggatggacaatataatttccgccctctcaaacgttttgtctttggaggaatctactccggattttcttccaaaggaagtcatccggaagggaaggaccatttatgggttcatttcattggtactcaaatcggaatgtgtaatgccaacaccaaacattggcaaatccgcgtaacaactggtcccggtggagtcattctacggaacaacagtgaggtgttcggcaaaacacggaaagtgaaagccttcactattggtctcctgaccaatgccaatcttacctataaactgaatcccaatctgggagtcagtctaggagtacaatatatgtatagcgaactgcttagaatgagaacccactatcacggagaaagggttattgtaaaactcgatggcaatgatgataccaacctcacacgaataaatttcactacgggattatcctattacttctaacattcactaaaaaaagcactatgaagaaatatatactcattcttttttccatcatcagcttttggagctgtacggaagatgaatcgattgacatcacagttttaccttctgccaccactacaggtgccaacacctttggctgtctgatggacggatggatttatgtgggaggacgatacctgaattgggggcactcgtatgtctggacgtatgattcattccactactatccggaggaggacaaactatccgtcaatgtttccgtcaaacctgacatcaacatacacttcatcattttatctccccaggaaggcaaagaagcaactctcaccgatatacggttcagaggagaagaactggaagacggaacagcttttataagccatttcgacccagaattgaatattatcagtgcaaccttcggcaacggcaaacgtctgactaacggacgttttgatatccattatacaacacaacagcaataataacggcggtgacagtaataactattcagatttactttcttctcccgccttattggaaggattgttacttttctgatattctttgggagtggttgtctcatttccatcccgtacagccatatagtgcggcgacataatttcaatgccggcttcattaaatttatcctgaatattctgatgcaaatccgaataaatctgtgccattttatctgcctgtttgatataagcattaatttgatagaccggataccaatcgctcaacgaagtttccaacacaaacggacgcggatcgtccaccacaccgggagtgttcaacgcagcatcaatcagtatctgattaacctgccgccagggaacatcataaccgatagatacttccgagtgaataatcaatccatattcacgggctgaagtactgtagtttactgtatgagacgacatgataaatgaattgggaacagtcacaacctcatttttaggagtccggatacgggtgacaagaggagttttttcgatgatatcacctgtggtatcattcaatttgatccggtcgcccatcttgaacggacgcatataagtaatcaccagtccggcaataatattaccgataaccgtacttgatccgagcgaaacgatcaatccgacaaataccgaaataccttggaacacaccggaatcggagcccgggagataaggataaatcatcgcaatcataaatgcataaagcaggaaacgggcgatatggaaagtcggcatcgcccagtccgggtagaagccgttgattttgagtcgtcctgcttccacttcacgtgccagatacaagacgagacgtaccagatacctcacagcataccaaataacgataatggtaaacaacttaggaatatagtcaatgatacccacaaagatagcgcgaatcggattccatatatatcctaacagttgatatgccagtccttctgtctgtgggaagatgatgaaaatcaacggtacggtaaacagtagctgcaaccccatcagtatataccgcccgatactggacaggaatactaacaggtttgcctgtttctgcgcatccagcaattcatacccctggatggataccggttttatcttcgtgtctttcagacgcaaaatacgcgctttcagtttacggaacaaccagttggtcaagcggaacagaaaatactgtcctacaattaccaacacaaaatagagcacacgctttgccattcgccaaagtccgtgctccgccttcatctcatgcagtttggtaatgacattttgttgtctttccttagccagcgaatcacgggagactccttcccacaaagcgtcctgatcggtaagagaaagcagtactttgctgccgtacatcaaatcggaaacaatgtccgaatggtcaatagcaacagaatcaggtttcaaattaaaacgtcttcctatttcttcgatcgctgcaccggtcatctgtgcacgttgctggggagtatatccgccacgtttggtgaaaaggtaaaataaggtatcaccgtccgccactaccggcatgcccttagtgaactgccgcagggagtcgatacgctgacgctgctgtgcatattttacggagtcggcggtagccatctggagcttcatctgctccatttccatccgcatattcgcctcgttgagccgggcttcttccaatgatttccgcatattcaccagatggatagaatccgaatcccgcttcaaaggaacatgtctgcccgttattgtatctccggcaaatatcttcttaaccgcctgttccaactgtgcttgcgccccgattgccaggaaagaaaagaacaacaccagtaacgaccgttttattttatttatttccataccttatattccttgattataattaaggttaatctaacatttcattaaaaacagagcaaacatacggattgtttttgacattaccatttacaaattgattatctttgccactaaaagagaaaaaaatatgaatatattattacttatcgggggattaatcctcattcttctaggagctaacggattaacagacggtgccgcctcggtagccaagcgctttcacatccctcccatcgtgatcggacttaccatcgttgcattcggcacttctgccccggaactgacggtcagtgtatcttctgctctcaaaggaagcgcggatattgccataggcaacgtggtgggaagtaacattttcaatacgttgatgattgtgggctgcacggccttattcgccccgattgtcatcacccgcaatacacttagaaaagagataccgctctgcatactttcttctattgtcttgctgatttgtgccaatgatgtatttctagataaagctccggagaatatcctgaacagagtagacggcttattattactttgtttctttgtcatcttcatgggttatacctttgccatcgcctccaagccgggcacaacggaacaggcgggacagatagaagctccgaccatagaagaggagacagaaatcaaatcactcccctggtggaaatccattctttatatcatcggaggcttggctgcccttatttttggaggtcagttgtttgttgacggcgccacgggcatcgcccgcaacctgggtgtcagcgaatcgattatcggactgacactggttgcaggaggtacttctcttcctgaactggctacgtctatcgttgccgcattaaagaagaatccggaaattgccattggaaatgtgatcggtagtaacctcttcaatatattctttgtactgggatgtagcgccagcatcactcctctccatcttagcggaattaccaacttcgacctgtttacgctagtaggttccggtatcctgctctggttattcgggctgttctttgccaaaaggactatcacgagaatcgaaggagggattatgatactttgttatgtggcgtacacggtggtattgatttataacacttgagaataataaagaggctgtgtcaaaactctcctttcattcatgctggtaaattaaaactaatcgttatttcacctcaacagttgtcaatacattaacgccatattttccgtcttcagacacccaccaggtggtattaccattcgcacagcgcagggcgtaacgaggattatatttcaaccgttccgaaccatcgggtatccacagacccagtctgtattctccggcgggcattgagccttgtaattgaagagactgatttacagaatgtaccaatggcgtatatgccgcgtctcccggttggaacggttgccaatccaacgggttggctttcgtcaggaactcggtgactttccctttgtcgtcaatcaacacaaagtagacaggatgctccccaaagacagtggcaaaacctctgtttaccaagcctaatttcagtcggttttccttaccagactgtaacttttccggtagttgaagcgactgcaattcaatccgatagccaagatggtcgcgtatataatcgaacatattacgttgtaccttcgttccgtcctgcttctgaaaatagctgtcggatacaggcatatgatgctgacgaagtgaatcttccgttatcattgttttcttccacacaatcatggagtattcgggaggattgttctcatcaaacctgttattaggatgctgctctttataattatgtataatactcaatgaagtataatgctggagaaacaggcgtctcgccgtttgcataccatcgataatccatcctgctgaaggactgtccggatcggcacctacactccaaaatccccagggaagttcaccgtctaccaccaaataaggcgattctttcacaatctggtcgaatttgacagttccttcgtgcatatcagcatcccacctgtcaggccgtatgacaataaagtcatcgtggaacgagagtcttttatacagttccggtttatctttcaacaggttcttaaattccggtagtctcacttgtacatttctctctacgggaaccaccgaaagcaatttttccaacacggctgcttttgtttcttccgagttctccaaaccctgaatagaactatgccattctccccatgcaccgatcatgccggcttgcactaccaaaatcaggtctttatttttctccaggaaaggtttcaactggtccaaatgttccaaaatctgctctccggtaggaccgacggcggctctccccataaagtcccgctcataagcaaaacgcaacaccgctttcttacccaacttctgtagttcatcaaaataggtttgcatagtttggaagttttcctccgatagtttttcacctattaaataggtaagatagaaatagctttgagcgagtgacacactgtctgctacatacttttccgatagttccaacaattccgttgtcggacgatctttctcgtgcaacacatccaccgccgtctccaaccggaatcctcttccgggattatagagtccattttcaccatgcagatcatccacacaaattccgcgaaactcaagagtccgttgagaatcaccacagccgcttaccagcagggccaataaagcagtcatcacactgccatacatccaattcttcttcatagtaatattttgtttgcaggcaaatatataacaaatcaaaacacgaacacagatcacaacccatttcgcacaggaaagtatcagtttgggataaaaaaagcaaaagtattagttaatgctaagattgtatttgtctcgcaagttgaataaccctacctttgtcacagcagtcagtaacagttaactgaccattaaaataatccttaaacagtaaataatacatgaatagattaaattggttcttcttactaatagttaccgttctgttgattccggcagaaaaggccaccgcaaaaaagaaaacagaaaagtgtgacagagaaatatggtgcgaagtgatgtaccggatggctgctcccgtattaagtaatatgagcgaaggagcactaaaacaaaatatgcttgtcgaattaagcccgacatgggacggccgcaacaaagatgtcacttatatggaatgtttcggacgactgatggcgggactggctccctggttgtcactgccggatgataacaccacagaaggcccccaccgtaaacagctccgcgaatgggcactgaaaagctatgccaatgccgtagacccgaaaagtccggactatctgttatggcgccaggagggtcagacactggtagacgcagcctatatcgccgaaagttttctacgaggctatgatgctttatggacaccgttggatagcctcactaaacaacgttacatcaatgaattcactcaactcagacgagttgatccgtcatacagcaactggttattgttcagtgcaactgttgaatcgtttcttcgaaaagcaggcgcacccagcgacacctaccgtataagttcttccttacggaagatagaagaatggtacgtaggtgacggctggtattcggacggccccaacttcgcattcgattattacaatagtttcgtgatacatcctatgtatatagaatcactggaaataatcaccgaagccggcaaacacaaaaatatatggaatatgcccggctgcgattatcagaaagcaatcacacgggcacaacgattcggcatgattctcgagcggcttatttctccggaaggaacactacccgttgtcggacgttccatcacttaccgcaccggttccctgcaaactttagccttactcgcctggcgaaaatggcttcccaaagaattaacaaacggacaagtacgtgccggcatgactgctgttatcgagcgtatgtttggcaacgaccgcaacttcaatgaaaaaggttttctaacactgggcttcaacggttcacaacccggcatctccgattattacaccaataacggcagcttatatatggcgtcacttgccttcctgccgttaggtcttcccgcagatgatccgttctggacagatgccgcacagccttggacttcgaaaaaagcatgggatggagatgattttccaagagatcattcttatcacgagaaataagtgataatcagcatcatataatagtttccagttgtactggaaactattatccattcacactgaaaaaacaaataaaaagcaatttgtataaaagtattggtatatgctaatattatatttgtctccttttcacaatagccctacctttgcttatcgtcaatgatgacggctcattaaacaacgaataaaacattaaccatttaaataaaagtatcatgaatagacaaaaccttttaacattgctcgctacattcgcattactcttctgtttcacatatttttgtaatgccaaaggaaaagacaaggccaaacacgttgttttcatcggtttagatggctggggcgcatatagcctacccaaagcagatatgcctaatgtcaaaaaattaatggaagacggttcttatacattaaagaaacgttcggcacttccttcttccagcgccatcaactgggcatccatgtttatgggagccggaccggaacttcacggatataccgaatggggatccaaaacacctgaacttccgtcgcgtgtattgaacaagaacggaatcttcccgactgtattccaattgctgcgcgacgcccgtccggaagcagaaatcggttgcctctacgaatgggaaggtatcaaatatttagtggacaccctttctctgaactatcattatcatgttgccgattgcaacaaaactcccaaagaattaggcaatatggcatcagcctatataaaagagaaacatccggcccttgttgccatctgctacgacggccccgaccataccggacatactgaaggacatgatactcccgcctattatgaaaaactcaaagagttggatatatatgtcggtcaaattgtccaggctgtaaaagacgcaggaatccttgatgatactatttttatattaacttccgaccacggcggcattgacaaaggacacggtggcaagacaatgcaagaaatggaaacagctttcatcatttccggcaagaatattaaaaaaggacttcgttttgatgacgtaagcatgatgcaatatgatgtagcttctaccatagcatctattttcaatctcgaacaaccacaagtctggataggcagaccgatgaagattgttttcaaataatcactcttttctccatactcatcttatttactgaaacaaatacagcaataatctttcaatatactgaaagattattgctgaaatatagtcattatacaaaaagtctactcactgaaaaaatgactcttcttaaaaaaagaatatctaaacagtctggaaaggcattaattacatccaccgtttgaaaagaatagaaaagcgccggcatttacaagtacaaaaatcttttttattattatttaaatgattccccaatcaaatcgcaacatttttccttctttacctaccatttaaaaggaataaattcgaatattacacattcctgtcactgtcttgttctcaacatttataataaaccagagggaaaacaagcactcaatacccccttcacatcttcctcaccgagaaacaatagcttctccggtgagaaacaaaccgatgcacaccgaggaacacctcattggttttaaagtaacaagtgctttacgaacaggaaaagatgcatattccgtatagttttatacaatatcagcttatattttcgtatatacatgcagctatttatgcaatatcttctatagttcatcaattttagcataatcacttttcaacaaaatcttaaaaatagcacattaatagagaaaagatatgcaactttcaactatggtatcagccaaattccggaattattaaaacgagaaaaaggcacaaccatttgctgcctgcaaacagcaaatgattatatacccaattttgaagatgaagtttatcgcagatccaatggaaccaaatagtaaatcaaagccattcattctttatttcatttatcttctgccggaaatttttatatatcccagagggcattatataaatcaggctttaatattcataccaataaattcgtcaattaatggtatttaagtatcacattaaagaaattatattgtcttttttactcatatttatgctttttgttaatattgtattagtatttgataaaattatatttgtccctcgtactaaaccaccctacctttgctcccagattcaaacaatataaaattatatatgcaatgaaaaacaaattattttatcttattggagtagcacatctattaagttacatcagtaaatagacttccagtgtaagcaatgttgatggaaaatattccctattgccactcacaattaacaaaacgaattatacgtctaagagtttataaatctaatgcaataaatcatgagtaaaaaaattcatttcttacttttcttctttctctgcctagccagtattccattggtagcccagaatattgaagttaaaggagtcgtaacagaagctacgactaacgagcccttaccaggagtcacagtaaaagttaaaggaaaagacactggtacagttacaaatatggacggtaaatataccgttaaagccaataaaggcgacatactggtattctctacaataggtatgaaaagtatagagcatacaatatcatctaacgctccgattaatgtcagtatggaagaagacaatgtggctctcgaacaagtagttgtcatcggatatggtacagcaaagaaaagtcacctttccggagctgtaagttcagtaggcgcaaaagaactgaatggtgccgttgccacaaatgcaggtacagcactccaaggtaaaattgcaggtgtatccgtaacaagtactagcggtgacccgaatgaaggaatgaccattaacgtacgtggtatcagttctctctctagcaatgatccactttacgtcattgacggttctttcggagaccttagcatggtagatccatcagatattgcttccattgaagtgttgaaggatgcggctgccgccgctatttatggttctcgtgcagccggtggcgttgtattagtaactactaaaagcggtcgtaaagacatgcctacaaagcttgaggtaaactttttcacaggtttcagccagacaccgaaaaaactgaaagtatttaatggtgaagaatacagccgcttcgcacgttattataaactgtctgctgatggttacggtaacgaggtcggtgctgttccctttgtaggtgaaggtactgattggcaagaggtaatgcttcgcaccgcaatgacatacaaagcaaacgcaaacatcagcggaggttccaagacaagttcatatagtgcgtccgcaagctatttaaataaggaaggaattctccgtaacactagccacgaatcttacaatattcgtttgaaaagtgactattcttttctggataataggttggttatcggtgagtcgctgattgttcgcttatctaaaggagaaggaaacatcaatcaagatacaatgggagaaatcttgcgttttccctcagtcgtaccggtatttgatccgacaaactctacaggatggggaacttcggccgatatcaatctcccgaacccgtatgcatattactcaacggtgaacaaaaacaatgagaaaactcaaattttcctcaacgcttatttacaagctgaaataattaaaggtttaaagtataagttgaatctcggacttagaaaggatcataacaggagccgcacatatacaggcatttacgatttgggatctgctggtaaaaacgatgctccagacctaagtgagggatcatccgattacgaatcgtgggttttggagaatacgttgaactatgacaaggtattcggtaagcataatatttctgcattggttggttattctgcacaaaaagacaagagctatggattgaacggtagcaacacggatattccagagttcatctacactatgacaggtaacgttaagacaatgacagcctctagttcattgaaggaattaactctcgtgtcgctcttcggacgtgtgatgtatacttatgacgaccgctacctgttttcagcttctatccgtcgtgacggttcttcacgcttccaaaaaagacatcgattcggcagcttcccttcagcatccatcgggtggaatatcaatcgtgaaaaattcttcaaaccgctggaaaatatatttgaccaattcaaattccgtttcagctatggtaaactaggcaatcagcaaatggacaactactatcccactattagcatagtatccgatggcatgaattaccttcaaggaaataatatatggttcggtcagttacccaacgttaccgcagtctcacctaccaacctgacttgggaaagtacggaaacttttaacgtgggacttgatttaagcatgctgaacggtaaattgacattgaccgccgatgcttatgtaaaaaacacaaatgacgtattactacccattcctgtttcaggttcagctggtatcagcggacttcctatcctaaacgctggacaagtacgcaataaaggatttgaactatctgtaaactggcgcagcaatatcggcgataatttcaactattatataggtgcaaacgtcactacagagaaaaataaagtaacgaagattacggctggaggcgacgatatgggtatttcaggttattccgctcacgccgctgccaaaaatggtatcaacagatttgaaaaagggcatcctatgtcttacttctatctagttgaaagtgatggaattttccgcactcaagaagaaattgacaattacaagaataaggatggcagacaaatacaaccgggtgcacaaccgggagacgttcgttacaaagactggaatggtgatggtatgattgatgaaaatgaccaacatgatgtaggcaatccgttcccggatttctcattcggtctgcgcatgggaggcgaatggaaaggatttgacttcaatcttttctttgatggtatgactggtaacaaaatatataattatcaacgttattgcctcgaatctggcaagttcaatggcaactacagcacgaagttggctaactcatggagaccggacaatcagaacacagacattcctcgtttctctaaaacagatgggatagacaatggtttagcctttaccgacagatggctggaagatggttcttacttccggctgaaaacactagatatcggttattcccttcctaagagcctgttaaagaaggtaaaactggaaaatgtaagaatctatacatcaatggaaaacctgttcacattaagtaaatattccggctattcccctgacctcggtcaaagtggcagcgtagatatcggagtgggttacaacgtattctcaagaggagtagaccaaggacgctatccactcccgcgtactatctcatttggtattcaggttagtttatgatacaatgataaaatccactaattgaattaataacatgaaaaagaattggttatcatatatatgcatggcaactctcttatccggagcactgacttcatgcaacgaaaataaatttctggatctgaaagatcctaatcatttcacggaagaaaacttctggagaaataaagcggatgtagaaagcggtcttgccgctgcttattcccccataaaatatcaaatgtacggttattacggagcatttgacggatggttaaatttaaatagtcgtggtgatgatatttttacggttctgaatgaagaaccttctatgtggaccatcgcaacatttcaaaactcaactactaccggatatgatccgtatggagcgctttatgctggtatccaacgtgccaatcttgtaataaaaaacatcgataaaattccagcggcaggaattagtgaggaagaccgatccatgattaaaggagaggcactctttttaagaggattccaatatttcctattagttcataattataaagaagttcctctacgtttaattccgtctaacgaagacgaaagcaataaacccgcggctaaagaagaacaaatttggaaacaagcagaggatgatttaaaaaatgctataaatagcaatattcccgtcactcgttccggtgacgagaaaggacgtattgagaaaggagcagccatcgctatgcttggaaaagtatatttataccagcacaagtatccagaagcaaaagcccaactggaactattgacgaaagccccttattatccaggacgttacgacttaattgaaaactttgccgagaattttactacagcgaatgagaacaataaggaatctgttttcgaattgcaatatagtagtgatggtgaattgacatggggtaacgaaagcggtatcaacctaggtaactcacttccaacatttgtaggtccggttgccgccggtggttgggctaagcttatgccttccagctttgccgtcggccagtttgtgaaagaagaacgtcctgccggttcggatacgaagtatgacaaacgcatgtatgcaagcttatttttcaatcccgaagctatgggagatgtagtgaagaacgagaaatggtatggaggaagccgttctatggaacaactttgggatggcaatagcggtaaaatgagtggtggtgctccatcttacagtcaaggtgacggtaagtttttgctaaaaaaatacactgcatattttgtaaatgcttctgatgctgatattatgggtcataaggaagggaaagcaaacaatttacgagctatgcgattctcagaagtgctgttaatgtacgccgaagcttgtgccaaaacaaacgatgtaaacggggcaaacaccgcattgaagctcgttcgcaaaagagcaggattagctgataagacatttgcccaatcggacttgatgttagaaatagagcaccaatgcttgctcgagttctttggtgaaggacatcgttttgacgacctaaaacgctggtataccactgaagagattaaaaatattttcactgaaaatgaaaaacagggagcagaatactttcaagaaaaacataaatattaccctattccttccggagagttgaacaacaatgatgccatggtacaaactgaactatggagataatatttttacaaccaatttatacttagaatatatgaagaagatatactcattattatttgtagcattattcctattcttaggatattcatgtgacgatggaagtttagaccatagtgatgtttttatcccggaaccagttgaagaaaattttgacgatgacggaattgcaccagaacctacaactaccgctgttgtaagaatgaaaatcagagaagaaaacaaacatcaagtaattgatggcttcggctgtgccttctgcggatggtcacatcgtatttggaatacgatgcagcgtgacgcagtgatagaagacctgtttagtgaaaacggtttggatttaaatattttccggggcgaaatattcccgtcttacggtaatccaactacaggagacattgaattcaagatggatcgcaattttatgttgcaacccgatgatccttctatgattaataactactggcgaaactacaatggtgaagagtgcggagaacaatgtcaacttggccaaatgtggttagttgaccttataagtagaaaatataaagatgtcaatttcttcttttcagtttggtgtcctcctatcaaatggaaaagcaataacaaacttaatggtggaagcctcaagtcggaatattacgatgaatatgcccaatatctattggatttcgtcgatgcatatgaacaaaaattcggcattgacatatatgcattatcaggatggaatgaaccggataaacttgctagtttaggtggttgggcaacctgtgcatggtctgaagaagaaatggctaaatttgtcctcgaaaaacttcgtccagcgatggagaaaagaggccacagtgatatgaaacttgtttatgcagaaaatgcccagtggaaatgggcggtcgattttatcaataatagtttaaaaaaatatccggaactggtagatccaaatttcattgtagccggtcatggatattctacaagagatgaaaatgtcattccttttgaagaggcagaaaagcgcaatgtccacatgtggcaaacagaacttagtgatgataaaggtcgccaagagacatggccggatgcaatgaaatgggctaaaacttttcatgcttatatggcaaatgccaatatgagtgcctttgtatggtggtcaggtgcacgtccttgcagcactacgggcgaaaacctaattcaattagaagaggcattacctagtacatactattacagagttccacgctactatacttttggacagttcagcaaatttattgagcaaaatgccgtacgtgtagacgtagaagctatttcttcagaaacagataaactccccgaagacttgttggtttctgcttatgtgaaagatgacacctacactattgtactaatcaatttatctcaaaaagaatcattctctacattgattgagattgaaggagtggaattccaaaatatgagaacatatacttccagtgaatatgtgaagtggaaacacaaaaagatcaatccgtctcaaagcggtttacgttctattaccgttcccaaatatagtgttgtaactgtgactggtaaaatgaaaaaccatgaagttgaataacgaattataaattagagaatatcatgaaaagaaatataatacacttaacaggaatcgcactttgtgcaatcggattattttccggttgtaatgaagacttacctagttacacaagtctgactgtggatgcagagacattgacaattaatttagatgagacaaccgaagggagttttaatattactgggggcaatagcggatacaaagtgtctagttcaaatgctgcagtagcgacagcagttatttcgggcaatgaggtgattgtaacaggtttgaaatatggtactgcaacgttaaccgttatcgactggactaagaattcggcaaatgtgaaagtagtggtagctcaagaacaggagttagcagtaaaaacaagttccacgactatgttctttgaagaacacaaaacgctcgaaatatatactggaaatggaggatatagcataacatcttccaatgagtcagtagcaacagcaaaaatcagtgaagatggaaaaatagaaatcacttcttctatcgttccgggtactgcaatactaaccgtgaaagacagtcacaacaaaacagccgagattgctgtgaaagtaataaagaggctggtagtagataatagtgaagatattacttatctaataacaagcgaacccgttacgattaaaattttggatggaaatggtgaatatacttgcactccccccaactactcctcatcctatctcaaatgtacgatggcagaaaatggaacagaagttattattgaaggattgaaaagaaactatttcaataaagcaatcaccatcaaggacaaagaaggacaatccattgacattcatatcaagactattgatgaaccttattgggaaaatccaagttatcgttacttaatagctggttcttatgcttatcagtatctttctacagcaaaagttggtgaagctatttattctgaagaacttaatatttcgctactaacaataaagagtacaggaagttatgcttccggatttgcagtccaatttaccggtaatcttgaagaaggagcaaagaccaatgctgtactttataaagttgctaaaaatgcaatagataaaaatgttgcctattcaatagaagactgtaaaatagataaagtagaagatggctggtattgggttagcttcttggaacccggttacaccgttcgttcttactttatcactaagcaataatttataaacttgacatatccgtttaaaagcacccccatacttttagaatgataaaacataaaaagaaactgttcgtacaacacagtatgcatttcatgtctatctgcattgtgaacagtttctttttatcttgtcaagaagatgcaagggaaatggactgcaaatctttatctcttaatatgttgaattgatatgaatagatacaataatagacttcatattctaaaaaaagaacatgagtcacttatctcacgtaaaaataagatgatattttccgaaaatggaatattcgagcgctataaatatcctatcctgacagctgctcatactcccttggaatggcgttatgatttgaatccggaaacaaatccatacctaatggaacgaatcggagtaaatgccaccatgaattcgggagctatcaaatggaatggaaagtatctaataatagtacgtgtagaaggaaacgaccgaaaatcattcttcgccattgccgaaagtccgaatggcatagacaacttccgtttttgggaatacccgatacatttgccggacacagacccaagtgaaacaaacgtctacgacatacgtttgacgacccatgaagatggctggatttatggaatcttctgtagcgagagtcttgacccgaacgctgcaccaggcgacctgtcttccgccatagccaaagcaggcatcgtgcgtactaaagacttaaaaagctgggaacggctgccaaacctgatttcccaaagtcagcaacgcaatgttgtattacatccggaatttgttaatggcaaatatgcactgtacacccgtccacaggataactttatcgacgccggcaacggaggaggtattggctgggcgcttatagatgacattacccatgcagaagtgaaagaagaaatcattataaaccaccgtcattaccatacaataaaagaggtaaagaatggcgaaggtccccatcctatcaaaacccccaaaggatggttgcacctcgcccacggtgtacgtgcttgcgctgccggactgcgttatgtgctctatctgtatatgacatctctggaagatccgacaaagataatcgctgagccgggtggatacttaatagctccggtagatgaggaaagaataggtgatgtctccaatgtgctcttctcgaatgggtggattgcagacgaggacggaacagtgtatatctattacgcatcttccgatacccgcatgcacgtagcaacttccaccgtagacaggctgatagattattgtcttcacaccccggcagacggtttacgctctgctgcttctgtagaaaacatttgcaagctcatagaagctaacaaatatgtaatggcagaacaggtttatttttaaggtaatgtgagctcaatacttgagcagtattagttgcccgtcattgacaaattccacgtcaatgacgggcttcttataaagcaggacacaaaccgacatagataagtgcgtattgcaggtgaaataacgcttatcaaaagtgcgcattgcagggtataaatagggaattatttcctctcttttttatttcttataagttatagaataaaccaatatagctatcttatttcttatacgaaacagaacaatagaagtaatattcaaacaatcgatagcaaaatagtatcatttattcaaatataataataccatatttctttcttataataccacaattccttttttaaatataataaaaaagacagaaatatacaatatactggttgcacaaacataataagcaaagcctatatagcttataaacagaatatttgggcttcacttacaaggtatgagttcttaatcaacaattaattacacaagaaaacaagaagcaaaattgtatcagaagcggctaaaataatatttgccatacatgccattatcctctacttttgcatcagacgattatcagttgaaatttccatggatcgattgataattgaactagagttataaatctaatgcaataaattatgagaagaaaaattcatttcttactattcttatttctctgcatggctagtattccactagcagcccaagacattgaagtgaaaggagtagtaacagaagctacgacaaatgaacctttacctggagtcacggtaagagttaaagacaaagacaccggcacaataacagatgcagatggtaaatactccatcaaagcaggcaaagggaatacactagtattctcaacaataggtatgaaacaaatagaaagagctgttacatccggagccccaatcaatgtcacaatggaagaagacaatatcgctcttgagcaggtggtagtgatcggttatggtacagtaaagaaaagtcatctttcgggtgctgtaggctcagtcagcgcaaaagagcttaacggacaggtggcttccaatgccgcaacagccttacaaggaaagattcccggagtatcagtggcaagttccagcggtgaccccaatggaagcatgacgatcaatgtacgtggtatcagttcattatttaataatgacccgctttatgtaaagcgacggatcatttggtgacatcagtatggtcgatcctaacgacatcacgtctattgaggtattgaaagatgccgcctcagcagctatctacggttcacgcgcggcaggtggcgtcatccttatcacgactaaaagcggtcgcaaagacactcctaccaaactggacatcaacctctttacaggtatcagccataatcctaaaaagctgaatgttttcaatggagaagaatatagccgctttgcccgttactataaattggctggtgacggcttcggagctgaaacgggtgcagttcctttcgtcggagaaggaacagactggcaggatgtcatgctgaatacagccatgacctacaaggccaacgcaaccatcagcggcggttctaaaaccggagcctatagcgcatctataagctacctgaacaaagaaggtatcctgcgcaataccgaccacgagtcttataacatccgcctgaaaagcgactattctttcctgaataaccgactaactatcggacagtctatgattgttcgcctggctcaaggaaaaggtaatattgatcaggatacaatgttcggtatcttgcaattcccttcagtagttccggtatatgatccgaccaatgcaaccggatggggtacttctgccaatatcaacctgccgaatcctctaggatactctaatgtaatagacaacactaacgaaagcaccagaattttcctgaatgcttacctgcaagccgaaatcattaaggacttaaaataaacagatagctaaaaagtaaatttgagaaaagcgtagcgattcaactgaaagagtggtcgttacgcttttgcttttgatgtggaaaaggtcgtttgcagacatccaaaagccacacaacgcaagagttcagttaccacatcattactgccgtaatgtgtgaacttccagaataagcatctgtttttctgcgatttgcgtaattttgcgtagctgttggtaactcacggtaaactaattttgtcaccaaaaaagaagtgagttatgcgaagtacattcaaggtcttattctacgtgaagaaaggcagtgcaaagcccaacggcaacctgccactgatgtgccgccttacggtggacggagagattaagcagttcagttgcaaaatggaagttccaccccatttgtgggatgtgaagaacaaccgtgcttcgggcaagagtgccgaagcgcagagaatcaaccgtgcggttgacaagattcgggtggaggtgaaccgccgctaccaagaactgatgcagacagacggatatgtgaccgctgccaaactgaaagatgcctatctcggtatcggtatcaagcaggaaaccttgctgaaactctttgagcagcacaatgcggagtttgcaaagaaagtcggacacagccgtgccaaaggaacattccaacggtacataaccgtctgcaagcatattcgggagttcctgccccatacatacaagcgtgaggatattcccctcaaagagttaaacctcacgttcatcaacgacttcgagtatttcctgcgcacggtgaagaaatgccgcactaataccatttggggctatatgattgtgttgaagcacatcatttccatagcgagaaatgacggtcgtctgccgttcaatccctttgcagggtatatcaactctcccgaaagcgtggacagggggtatatcacgaaagaggagatacacaccatgatgaataccgagatgcccgacaagacccacgagcttgtgagggacctgtttctgttttcggtgttcacggggttggcatattccgatgtcaagaacctcaccaccgacaacctgcaaactttctttgacggtaacttatggattatcacccgaagaaagaagaccaacaccgaatcgaatatccgtctgttggacgttccccgaaagattatagagaagtataaggggatggcaaaggacaataaggttttccccatgccaagtaatacgacctgcaacaaaaagctgaaagccatagccgatttgtgcggtataaagacacatttaacatatcatgtcgcaagacattcggcagcaactaccatactgttatccaacggagtacccattgaaaccgtcagccgcctgttggggcataccaacataaagaccactcaaatctacgcgaagataaccgcccaaaagataagtcaggacttggaactgttgtccgacaagttgggggatatggagaaaagcatttgcagtgccatttgataacccataaagaagaatacagatgaaagagaaacgaagcatcatcacgatggacggacagggcaacatcgccctgccgaccgatacagtctccattgccatgaccgagtgggaactctgcgagttgttcggggttatcgccccaacaatccgagcagggataaaggctctttgtaaaagcggtgttttgagggaatatgagacaaagcataccatcaaactgtcggacaaacgcagcatggaggtttacagtcttgaagccatcatcgcccttgctttccgcatcaacacattcggagcggaacaggttcgcagagccatacttgaaagactgtacttgcgaaaagaaaaaacaggcatcttcttttcgctgaacatcactgatacggcaaatccgaaatactttgcataggcgtattgccattcacacatactcacgcacccgaagaagcatctgttttcagctctgtttcttcggattttttgtttttacagccccgaacagccccgaagtattttttgctgcgttctgctgtgatttgcgtatcaacttatccgacagttgattatacttttgtagctgacattttttcaaacttaaatcattggaatatggaagcaaacaaagtaaatgacagccaccgaccgcccacagatggcggcatggcaaaggaagagtttatccgtgtcggcacaacgctctacaagattgtggagcagccaagactgaacggagggtatgtaaggaagcgcatcgcatggaacaacgagaccctgcgccaagactatggcaaggactacatcggcagcgtacccaagtatgacggcttctgcaccgtacccgaacacgtcagctatcagcctgtaatcggcaagttccttaacctctacgagccgataccccaccaaccgcaagagggtgatttcccctctgtccgctcattggtggaacatatcttcggggagcaatacgagttgggaatggactatcttcaactgctctacctgcaacccattcagaagttgcccatcctgctgttggtgtcggaggagcgcaacacaggcaaaagtacattcctcaattttctgaaagccctgtttcagaataacgtgacattcaacaccaacgaggatttccgcagccagttcaattccgactgggctgggaaactccttatcgtggtggacgaagtattgctgagccgccgggaggacagcgagcggttgaagaacctgagcacggcactatcctacaaggtggaagccaaaggcaaagaccgtgacgaaattgcgttcttcgccaaattcgtgctgtgttcaaacaacgagtacctgcctgtcatcattgatgcaggtgaaacccgttattgggtgcgcaagatagaccgcttgcagtcggatgataccgacttcctgcaaaaactgaaagcggagatacctgcttttctccaccatttacagcataggcagctatccaccgaaaagaaaagccgtatgtggttcacgccctcactactgcataccgaagccttgcagaagattatccgcagcaaccgcaacagattggagatagagatgcacgagcttatccttgacattatggaaagtgtaggcacggacactttctcttttgactgcaacgatatttttcttttgttgcggtattcacaggcaaaagtggagaaacatcaagtacgcagggtattgaaagagtgttggaaacttaatcctgcacccaacacgcttacctataccacctatcagttggactatacccgtgactgtcactattcgcccatgcggaagacaggacggttctacaccgtgacaaaatcgtttttggaaacactatgattattttgatgaaatgatgaataagtatataaatatattgaaatatagatatttacattctcatcaaacattcatcaaaagtatctcactgatgaaaggagaaaacaggacggacagaccatgcccgacaccgtaaacgatgaatttctcttttcgtgagtggtttgatgaataaatgatgagatgatatatagatataaatcaatgtgttaaaccatatgttcatcaaatcatcgctttatcaaccatcatcaaatccgtaggaatatacattatgacaatacaggaagcaaaacaaatcagaatagcagactatctgcaaagtctggggtacacacccgtcaagcgacaagatagcagcctttggtacaagtcaccgctgagagaggaagccgaagcctcgttcaaggtaaacaccgaactcaaccaatggtatgacttcggcatcggcaagggtggcaatatcatcgcattggcttcggaactctaccgctccgacaacgtgccgtatctgttggagtgcatcgccaaacagacaccgcatctgcacaccgccatccatgtaccattttcttttggtcggcaatccgtttcagaaccgatgtaccgacatctgcaagtttcggagttatcctctcctgtactattatcctatttgcaggagcgaggaataagcaccgaactcgccaagagggaatgtaaggaactgcattttgaaaacaagggcagaccatacttcgccatcggtttcccgaatatggcaggtggttatgaggtgcgcaaccgctatttcaaaggttgtgtcgctccaaaggacatcacccatatccgacaaagtggagaacagccgacaacctgttatcttttcgagggcttcatggattacctctcgttcctttccatccgtgtgaggaacaatccgcaatgcccccgactgaccacgcaggattatatcatcttgaactccgtttccaatctcgcaaaggcggagggcatattggctgactattcccaaatcggctgtttccttgacaacgatacggcaggacggacagcctgtgagcatctgcaagcaaggttcggggaacgcctttccgacaagtccatacactatagtgagtataaggacttgaacgactacctgtgcggtaagcccttgtcccaatcggcagagccgatgaagcaggagaggcaagtccaatccgcaaggcggatgatgcagccaccgaaaaagcgagggctgaagatgtagggagtgagaacgcttgcagccgtgcggatatttacaagcggaaaataccatagcttattagggaattttccgagccgcattgcaagcaacgctgaaaattccccaataagccaaagaggttgcacctctctggactctcccaagccaacggcagaagccgtacaggagaataatcaaccattgtttcacaagctaaaaaagaaaggaaaaccatatatgggatttgtcgtattacatatggaaaaggcgcacggttccgacagcggaacgaccgcccacatcgagcgttttatcataccgaagaacgccgatccaactcgcacgcatcttaaccgaaaactcatcgactatcccgatggagtgaaagaccgaacagcagccatccaacaccgtttggaaaacgcagggttgacacgcaaaatcggtaacaaccaagtacaggcaatccgcatcatcgtgtcgggaacgcatgaggacatggagcgtatcgaaaaagaaggcagattggacgagtggtgtgccgacaacatgagctactttgccttcatgttcggtaaggagaatattgtggctgcgcaccttcatcgggacgaggaaacgccacacatacacatcacccttgttccaatcgtaaagggggaacgtaagcgcaggaaacgggaggaacagacaaagaaacgctaccgcaagaagccgaccgacaccgtaagactgtgtgccgatgacattatgacacggctgaaattgaagacctaccaagatacctacgccattgcgatggcaaagtacggattgcagcgtggcatagacggttcaacggcacggcacaagtccacgcagcagtattatcgggacacacagaaacttgtcgatagcctcaaagcggaagtggtagatttgcaggagcggaaagaagcggcacggcaggaactccgccaagccaagaaagaggtgcagactgagaaactgaaaggcgcagccacgaccgcagcgaccaacatagccgagagtgtcggttcttttttcggcagcaacaaggtcaagacgctggagagggagaacaagaatctgcatgagcgtgtatcagaacttcaagaagaagcccgacaaagggaacagcaacaggcgaaacacatacaggagataacagacgcttacgagctgcgacaccgcaaattgtccgagtttacagactttgtgaaacgctacttcccatatgtggagaagctgataccgacaataaatttcctgcgtgaacgcttgggcttcaatgacgatattatccgaagattatgcacattcaaggacgttcccataaaaggcaagctacattcttccgagttcaaccaaggctttgaaacccaacgtgccgtctgctccattaaagaggatgaaaatggaaagttcgatttcaagattgatggagtatcacatataagctggttcagaaagaagatgaacgagtttagggaagctatcggaataccgaaaccaagacaaaacagaggtatgcaactgtaaatcaaaataaagtccgtgattgttgaatgacatatcacggattttttgtacttttgcactcggattgaggcaactctatccaagacataagaaaaagaagcgttatgctttcttgtaagtcgagaacgtaggaaattcaagacactgcacaaggatggcatagtggttctcacgcatatagcgtgggctgctatactacattcgtgcatttaggtttcctacgaccttcgacttagaatgttgcattggtagtccacgtttctgcatttgagcatccgcttctttgggctaagaagcaaaaaagaaaactatatgaaacaaaaagttccactatcaaaaatgaacatgacaaaaacgctattatcagttatgctttgttgctgttgcagcattatggctttcgggcagaacatgacccaagaaattgaaaagattatcaaagggaagcaagcgtctgtcggggtagcaattatccataatgacgatataattgccattgccaacgaggacaaatatcccactatgagtgtattcaaattccatatagcagtgacagctctgaaaaaaatggaagcagagaatattccgctggacaaaatggtgtatatcaaacagaaagaaatgctgaaaaacacgtatagcccgttaagggataaatatcccgaccaagggattcgtatatcttatagggatataatcaaatacacagtatcgattagcgacaacaacacatgcgattggttaataaggtttgttggtggtattgataaagtggactcctacataaaatctcttgggataaaggatatgaatttcacggagacagaggaaagcatgcatacggacattatgttatgctacaacaattggagcacaccattagctattgcgcaattgctcaagaaacttcatacagaaaatattttgacaaaagagcattttgcgtttttagagacagccatgcttgattgtgtgtctggcaagaacaaactaatagcggggttgcctaccgatataaaatttgggcataaaacgggacgttctaaccgaactgctgatggcatacagataagcgagggagatgcaggagtgatatatcttcccaacggtgagaagtgctacattgtcgttttgataaaggattctcgtgagtctgatgatgataacgccaaaataatggcagatatatcaaatatagtttatcgtcatttgaataaataaaaatccaattgtaatgaatcaaagtctctaacatatatttgttggagactttttgttaaatttcatatcggaaaagtgtgcgtttcaataaaaagtaataactttgcaaatgaaagagttatttgacagtatagcaccgcaaaacgctgaaaatagcacagttgctaactcgttaccactgtttctcaaatactcagttaaatgtttattcttcaaacggttatattaaaccgttgaaaatctaaaatataagtttaacgtaggtatcagaaaggaccataccaaatcacgtacctatacgggtatatatgacttgggaacttttgggaagaatgatgctcccgacttaaaagaaggttcatccacatacgattcatgggtaatagaaaacaccctgaactacgataaagtcttcggcaaacacaatatttctttgttagccggttattccgcccaaaaagacaaacattacggcctgaacggaagcaactccgacattccgcagtttattgagacgatgacaggtaacacaaccaccatgagcgcttccagcaatctcaaagaattggcactggtttctctcttcggacgtgttatgtactcttatgatgaccgttatttattctccgcatctattcgtcgggacggttcttcacgcttcggcaaaggacatcagtatggtagtttcccatccgtgtctgtaggctggaacatcaatcgcgaaaaattcttcaatccattagagaatgtattcgaccaactaaagattcgtgccagctacggtaaactgggtaatcaggaaattggggacaattattacccgactatcagtgtggtgggtagtggtatgaactatcttcaaggcaacaatatctggttcggacaaatgccctatgtaaacgccgtatctccgactaacctgacttgggaaaatacagagacttacaacatcggtttagatcttagcctactgaacggacgactgacaatgacagcagatgcttatgtgaaaaacacgaatgatgtactacttcctatcccctacgccggttctgccggtatcagcggattctcgatacagaatgcaggaaaaatacgtaataaaggtttcgagtttgcggtgaactaccgtggttctattaaagataagttcaactactatgtaggggctaatatcagcacggacaagaacgaagttatcaaaatatctacaggtggtgacaatatgactatctccggttattcggcgcatggtcagggcggacgtggtatcaatatgttccaggaaggtcatgccatgtcttattttaacttaattgaaacagatggtattttccgcagtgcagaagaaattgagaactatagaacagccgatggcaaactgattcagccgggcgcccaagtaggcgacgtacgttacaaagactggaatggcgatggctcaataaccaccgacgaccagcatgatgtaggcagcccgttccccgatatgactttcggcctgagactgggtggagactggaataatttcgactttaacctcttctttgacggtacggtaggaaataaaatctataactacccgcgctatcgcctggaatcaggaaacttcaacggtaactacagtacgacgctggctaactcgtggagacccgacaaccagaataccgacatgccccgcttctccgttaccgacggtgcggacaacaaatgggcttataccgacagatggctcgaagacggttcatacatacgtttgaaaacactcgatatcggttatacattacccaaacagttgctaaaaaagatcaagcttgaaaatgtgagaatctatacttccatagaaaatctctttacgttaaccaaatactccggctacacgcccgacctcggtgaaagcggtgtagatctaggtaccacttacaatgtattcacaagaggaatcgaccagggacgttacccgctcccacgtacattctcttttggtatccaagtgaatttataagaaagaactaacacgtataattgaatatagtatgaaaaaaaattggttatcatatatatgcatggcagtccttctttcaggaatacttagttcgtgcaatgaatccagctttctggatctgaaagatcccaatcatttcacgggggataacttctggaaaaacaaggcagatgccgagagcgctcttgccgccgcatattctcctatcaagtaccagatgtatggttattttggggcttttgacggttggctaaacctgaatggacgtggagacgatatcttcacaatcactaatgaagaaccgggcatgtgggctatcgctaatttccaaaactcaccgactacgggaaatgatccttatggcgcactctttacaggagtacagcgcgcaaatgttgtactaagatacattgacaatgtaccggctacaggaatcaccgaagaagaccgttccatgattaaaggtgaggcactttttttgagaggttatcaatatttcctgttagttaataactacaaagaagtgcccctgcgtatcattccttctaatgaggacgagccgaacaaaccggcagccagcgaagcggtactctggaaacaagcggaagatgacttgacagaggccatcaaatgcaacctgcccgtcacccgtgtagcagatgaaaaaggacgtattgagaaaggagctgctatcgctatgctggcaaaggtatatctgacacagcataaatatccggaagctaaagctcaattggatttattattaaaagcgccttattatccgggacgttataacctaatggaaaacttcgcggagaatttcactactgccaaagaaaacaacgaagaatctgttttcgaattgcaatacagcagcgacggcgacttgacgtgggggaatgaaagcggcatcaacttaggaagttctattccgcaattcatcggcccggtaaactccggtggctgggcaaaaatcatgccgacttcatttattgtcgggcagttcatttctgaagaacgccctgcgggagccgataccaagtttgacaaacgtatgtatcccagtctgttctttaaccccgaagcacttggcgatgttgtgaagaacgagagctggtacggcggaaattattccatggagaaactgtgggaaggcaatgccggtaaaatggccggcggtgctccaactttcagcatgggtgacggtaaattccttctgaagaaatacactgcctattatgtaaacgacgaagcggcagacaatatgggaaacaaagaaggaaaagccaacaatgtacgtgtcatgcgttttgcagaagtactgcttatgtatgccgaggcttgcgccaaaacaaacgatgtgacaggtgccagctatgccctgaaacttatccgcgaaagagccggactggcagacaaaacattcacccaggatcagcttatggatcagatcgaacatcaatgtttactcgaatttttcggagaagggcaccggtttgacgacctgaaacgttggtacacaaccaatgaaatcaaaacaatcctcaaagcaaatgacaagcaaggggcagacaattttcaggaaaggaacaggtattatccgattccgacaggcgaattgaacaacaactctgcaatgcaacaaatagatttatggaaataatctttccaataacttataacagaaaaattatgaaaaaaatatatgcactattattcgtatccttactcttatttataggatattcttgtgaagacggtagcctgagccatggtgatgtatacatcccggatcccgtggaagagtcggacgaggatgatggttttgcgacagagcctacaacaacgtctgttgtgaggatgtctatcggcgaaggacatcagcatcagatgattgacggatttggatgtggttttgcagaatggtctcaccgtatctggaacaataaccacagagatgccgttatggcagacctattcggtgacaatggcttgaagctaaacatattccgtggagaagtattcccgcactatcaggacgacgtcacgggtgaaatagaatttggcatggaccgtaacttcaacctgcctgccgacgaacctaaatacatgaacaactattggttcaaatatcacggtgcggaatgtgccgaacaggtacagctaggccagatgtggctggtggactatctatccagaaagcataaaagcatgaagtatatgttctccgtatggagtccacctaaaaaatggaaagataaagacagcaactccggtggctctctgaaagctattcattatgaagattacgccaattatctgatagacttcgtcaaagaatacgaaaagaaattcggaataaacatttatggcttatcacctaccaatgaacctgataatactttcactgcatggtctacttgtaaatggactcctgaacaattggcagatttcagccataacactttccggaaatctctggacgcggccggatataatgataaaaagattataatgggagaatgttcctcatggtggaaagcaagttactcgtctttcctcactgcatccaatcagttcttcaagaaatgtctggaaagcgaagcttcattggcaaatgacaacgtcatagcggccggacacggatacagtatgtccaatttagataatatcttacctttcgatgaagcagttaatgccaatattcctgtatggatgaccgagaactgtgacaacttaaaacgttcggaggactggaatgatgccatgaaatgggcaagaaacttccattactatctggcacaagctaatgtaaatgcttatatctggtgggccggagcccgtccttgcagcacgacaggcgagaaccttatccagttggaagaagccataccgggcactacctactacagagtcccccgctattatacatacgggcagttcaccagattcatcgaagccggcagtcatcgtgtagatgttgaggctattccttctgaagagaatcaattccctgcagaacttctgatgtcagcttatgttaaggataatacttataccatcgtattagtgaacagttcggagaaggagtcattctccactttagttgagattgaaggaaaaagttttcagaacatgattgcatacacatccagcgaagacgtaaaatggcagcgcaagaagttcaatccttctttaagcgggttacgttccattacggttcccaagctcagtgtggtgacagttactggtaagataaaagatattgcagcagaataatagtcaaaataatactagaatatcatgaaaaagaatcgattatatatagcaggattcctgcttgcagccgtcaatttgttctccggttgcagtgaagatgatccgtcctatgccaatctggttgcggacaagcaggaattgacaatcaatctagatgaaaaagcagaaggagtgattcagattattcagggaaacggtaactacaaggttaccagttcgaacgaagatgtggttaccgctacaatcgacaatgaccaaatacaagtgacaggtttgaaagccggtgacgcaaatgtgactattaccgactgggccaggatgtcaaccaacgtaaaagtaattgttgaccaattggtagacttggttctgaaagtatcttctacagttatgtatccgaatgaagacaagaccatagaggtctatacaggcaatggaggatacagtatcactgttgataatccatcaatagcaaaggctgcgataaatgataaagggcagattcaaattgaatcgctggctccgggtactgccactttcaccgtaaaagacagacgggacaaaacgacagaactcatcgtaaaagtgaaaaagagaatggtagtcgacaatagtgaaaatatcccttacttagttatcggcactccggctactatcaaaatcctggatggcaatggtggatatacctgcacagcaggcggttctgcaacttacctgaaatgctccatgtctgaagacggtacagaagtgataattgaaggacttaaaagataccgttacaacaacaaagtcactatcgccgaccaggacggtgaaaagatagaagtgaccattaccgctattgacgatccttacctggagaacccgtcatatcgctatatgctggcaggttcttattcttaccaaagcctttctacttcaaaagtaggagaaataatgcattcggcggatttcaacttgtcgcaattgcttgttaagagttcgacaacttcatccgcatccggttacgcggttcagtttaccggcgatttgggagtaggcagcaagacgaatgcaacactttataaggtgacaagaaacgcagtagacaagaatgtaggatatccgatagaagattgccggattgataaagtagaagacggctggtattgggtgagtttcctggagcccggatacactgtacgttcctattttataaccaaagaataatttataaacttgacacacatgtatttcggaagtacccccatacttttgaagtgaccaacataaaaagagactgtccttacaacacagtatattccttattactatctgtattgtaatcagtctctttttataaattttgaacagatatgaatagatatgataacagattacgtattcttacagaagaatatgaaacgctcatctcacgtgaaaataaaagaatacgatccaacaatggcatatttgaacgctataaatatcctattctgacggcagcccatactccactcgaatggagatatgactttaatccggaaacaaacccttttttgatggaacgtttcggtattaacgctgtattcaatgcaggagctatcaaatataacggaaaatatctcattatggcacgagtggaaggttacgaccgtaagtcgtttttcgccatagccgaaagtccgaatgggatagataattttcgtttttgggaatatccaatccagcttcccgacttatacccggaagaaacgaatgtctacgatatgcgccttacccagcatgaggacggatggatatacggcattttctgttcggaaagcaaagatccggacgcagccgccggagatctgacttctgccgttgcggtagcaggcatcatacgcaccaaggacttaagaaattgggagcgtctgcctaatcttatctctaaaagccagcaacgcaatgtggtactccatccggagtttgtcaaagggaaatatgcgctttacacccgccctcaagacgggtttattgaagcaggcactggtggaggaatttgctgggcactagtagatgatatcactcatgcaatagttaaagaagagacggtggtagaacaacgttattatcacaccatcaaagaagtgaagaacggtgaagggcctcatcctatcaaaacgccacagggatggttgcacctcgcgcatggagtccgtgcttgcgcagcaggactcaggtatgtgttgtatttgtacatgacctctttagatgcccccaataaagtgattgcccaaccaggaggttacttcatggcacccgtagaagaagaaagaatcggagacgtttccaacgtattattttcgaacgggtggattacagatgaagacggaacggtctacatctattatgcttcttcagatacacggatgcatgtagctacctctacaatcgaacgacttgtagattattgcctgcatactccggaagataaacttcgatccgctacgtccgtagaaaatatttatcaactgatagaagctaataaggtgaaagtatagtaactgaattttcaatatggaaagcacaccatcgccattccttccggaatttgacaatggcgtgctttttctggttctttcattttattcataagactgaggcctcaacaatattcctttttataaacgataaaatcgcatatcttatcgtttatacaggggaaaaccgacttttcaaaggaaaaccaaagttgaagtaaacacagatatattaatatagtatcagaatgagttaaaataatatttgtttccccactactttcgccctacttttgcatcaaataaaataatgatatataaaaacctaatcgaaataacgatatgaaactacacgaaatcgatattctcatcatttgtgcctatctcattgccatgattgtcatcggacttatcctgaagaaacgggctgcccaaaatatggattcttatttcctgggagggaaatcattgccattttatatgctcggactctccaatgcttccggaatgtttgacatcacaggaacgatgctgatggtatattgggcatttgcctacggattcaagagcctttggattccctggttgtggccagtgttcaaccaaatctttctaatggtttatctgtccgtgtggttacgtcgttccaatgtactcactggagcagaatggattaagacacgtttcggtaaaggcaaaggatcgactctttcacatacgattgttatcatctttgcattacttagcgtactcggttttttaagttatggattcataggtattggtaaatttatggagatattcatcccctgggaagtagtatctccattcattcctttcaatgtgcctgcagaatatgttcctcatgtatatggtattttctttaccacaatcgccactttctatgtaatgctcggaggaatgttgagtattgtatggacagacgttgtgcagttcctgattatgacagtagcaggtatcgtaattgttgttatcggaatgcaaatggtagcgccggacatgattcattctttcgttccggccggctgggactctcctttcttcggatggacgctggatatcgactggagcagccggatgagcctcttgacggaacggatggcgaatgaaccatatagcctgattagcatcttcgtcatgatggccttgctcaaaggaatatttatgagtatggcaggaccggcgcccaactatgatatgcagaaaattctatcttgcaaatcccccaaagaagcggctatgatgagcggttccgtatcagtcgtactattaatcccccgctacctgatgattatgggatttgctctgctggctatctacttctttaaagaagatggcggtctgacacaaatggaagtgacacgaacggattttgaaactatcctcccccatctaatcacacgttatgtgcctgcaggattagccggaatcctactagccggactactggcagctttcatgtcgacttttgcgtccactgttaatgccgcaccggcttatatcgtgaatgatatttatctgaaatatatcaatccgaaagcgagtgtgaaaacacaaatacgcagtagctatattatttctgtcgcagtagtagttatcagcactgtcatagggttcttcctgaaagacatcaatgaaatattccaatggattgttggagcactcttcggaggatacatcgcggccaacgtactgaaatggcattggtggcgcttcaatggtgaaggctatttctggggaatgaccgccggagtaatagcagccatcgtcatgaagttcactgttcccgacgcatgggtactctatttcttccccgtactgttcggagtttccctgataggatgcatcgcaggaacctatagcgcacctccaacagacgaagagacgctcatcaacttctacacccgtgtacgcccatggggatggtggaagccgattgaagaaaaagcattggcccgttaccctcatatccagccaaaccgcaacttcaaaagagacgcattcaacgtggcaatcggcattgtgtggcaatgcagccttaccattatcccaatgtatctcgttgtccgccaacaattggggctctggagctctatcgcattgcttctggttacgaccttgatactaagaaagacttggtataagcctctgtgtaaagaagaaatcaggtacaacgaagaaataaaacaactaaaacaagagaaggaataattagcttaacacactaaaatttgagaaccgaccatgaaaagactatctgtgattctggtatcatttttactatatctgcctctatgcgctcaatttaagggaacagtttctgtcgacactaatcaatcgggcatagttgataaaggcgataagccgctggcgggagttatggtaacagatggattgaacgtagtaaaaacagataagaaaggtcggttctctttgcccggattcgagaaaacaagattcataagtattacaactcctgcgggatttgaaacacaacaattctacctttctaccaaagagaacagaaaaagctacgattttatcttaaccgaaagcgagcggacaaaacccagaaaacattctttcgtgcaaatcaccgacaccgaagtaacgggtggaatggggcgttgggtaaccgatctccagcaatacattgacaatgagaagcctgccttcctcattcacaccggagatatctgctacgaaccgggactcaccatccacaatcaagtggtaaatgcacaaacaatggattgtcctgtttattattgtatcggtaatcatgacttagtgaaaggcaactatggcgaagagctttacgaatctctctatggtccgacatggtattcatttgatataggtaacgttcattatgtagtcactccaatcgaccacggagataacccgaccaactatacccaaagagatgtatacaactggctaaaaaacgatcttgctctcataaaaaaagaccaggcacttatccttttcaatcacgacttatttactccaaatgactctttcgtctttaaagcagatgacgatcatctgcttgattttcgttctttcaataccaaagcccaaatctacggacacatgcattacaactatgtccgcaaccaaaatgggatttatacaatctgtaccgacacattggataaaggaggcattgaccattccccttcttcttttagagaaataaaagtagacgcaaacgacaatatcaccacccaactgcgatatgctttcatcgagccacaaatcgcaatagtctctccgatgaataatcagacggccgcagcctgcaccatcactaaagatcagcttcctgtttccgtcaatacatattattcgcaggccaaaacgtctcacgtttcttatatcctaagcgattcggaaaataatcaagaaatagctaaaggcgatctagcctcccgtacagaatggaactggggtggaaacattcaaatgccggctaatgaaatggggaaaaaactaaatctcacagtgacttcattcttcagcaacggaaagaaagcgactgctaccagccagtttatctaccaaaaggacttcaaattatccactattgcaggtgaagactggaatacattacttcaaaacgcagcacactccggcggagtcaacaactctcaaatcaagctccccctgcaattacaatggacagctaatacaggcagtaacatttttatgtgttctcccattatcgccggacagaaagtatttatcgctaccaccgacgataatgtatcactgaacacatttatctgcgcatttaattttaattcaggcaaactgttgtggaaattccgtactgcaaattctgttaagaacacaatagcctatgaaaatggaattgtagtagctcaagatgcctcctgcaacctctatgccttagacgcagaatcaggaaaattactctggaaacaatctattaatttggacagctatccctatctgactgaaggattgacagtagacaaaggagtggtctatgccggaatcggcgccggactatctgcctacaacctaaaaacaggacaaacgatatggactaacaaggactggaaacagcgggaaggttctactacaacactcgctattgccggagatgtattagtcagcggaacccaatggggaggtttatacggcaatgatatccacacaggaaagcaactctggaaactatctgataacggacctggcaaccggggagcctctcctgtctataaaaacgggaaattatggattatctcttccaagagcttcttcacaatagagccacaaaccggaaaagtattgcaacaaaaagagttatcagccaatctggatgttacatccaccccactcatcaccgaacaggaaatcattttcggtactgccgaccggggagttttcgcattggacaaatctacacttttcaataaatggaaagcagaaacgtcaccttcacttgtatatactgctccttattccaccactccgcaagccggagttgaaacaagtcctgttgcatcacaaggaattgtctacatcggagcttccgacggttatctatatgccatcgaccaaactacaggaattataaaagataaacgacacattggagcgcctatattttcaaccgtagccgtatccgggaataagatgattgtttgtggttttgcgggtaatgtttattgcttttcatcgaagtaaactccctcttcactatcataatgcataaactcaaatggtacataagcactaaaattatatagatacagtttttgccaccccacacgttgtaatttaaagattatcacgtatctttgcctgctcaaatcataaatacgagatatggctattacaatcaagaaagtctccacaaagagagaacttaagaaatttatccgtttcaactacagaatgtacaagggtaacccttactctgtgcctgacctctatgacgacatgctcaacaccttcaacaagaagaaaaacgcagcattcgaattctgtgaagcagattatttcctcgcataccgggacgataaaatagtaggacgtgtagctgcaatcatcaacaatcaggcgaacgagaagtgggaatgtaaaaacgttcgtttcggatggatagacttcatcgacgatcccgaagtatcatccgcactcatcaaaacggtggaagaatggggaaaagaacgaggcatgactcacattgccggtcctctcggatttactgatttcgatgcggaaggaatgttagttgaagggttcgaccaacttagtaccatggccactatctacaactacccatactatcctgtacacatggaaaagttaggcttcgagaaagacgccgactgggtggaatacaaaatctacataccggatgccattcccgacaagcataaacgtatctccgaactgatccaacgaaaatataacctcaagataaagaaatatacttccggaagaaaaatagccaaagactacggacagaagattttcgagctgatgaatgaagcatatagtcctctttatggctattctccgttgacacagcggcaaatcgaccaatacgtgaaaatgtatctgccgatccttgacttacggatggttacactgattactgatgccaatgacgaattggtctgtgtaggtatctccatgccatctctcgccgaggctttacagaaatcacacggacgtctgttgccactcggatggttctatctgttaaaggcactatttatgaaacgccgtgccaaaatgcttgatctgctactcgttgcagtgaaaccggaatatcaaaacaaaggtgttaacgctttgttattttccgatttaattccagtttatcaaaaattaggttttatctttgcggaaagcaaccccgaactggaactgaacggaaaagttcaggcacaatgggattactttgagactcaacaacataagcgccgccgtgcgttcatcaaagagataaaataaaaaacagctatggaagagaacgaattgatacctgtagacaacaacaatgcagtagagtacactgacgacaacatccgtcacctaagtgacatggaacatgtacgcacacgccccggtatgtatatcggaaggctgggcgacggtgcacatgccgaagacggaatctatgtcctcctgaaagaagtaattgacaacagtattgacgagttcaaaatgcaagccggtaagaaaatcgagattaccgttgaagaaaacctccgtgtcagcgtacgtgactacggacgaggcatcccgcagggaaaactcatcgaagccgtcagcatgctgaacaccggtggtaagtacgacagcaaggcgtttaagaaaagtgtcggactaaacggtgtcggtgtgaaagccgtcaatgccttgagctcccgttttgaggtacgcagttaccgcgacggcaaagtacgtatcgccactttctcaaaaggaaacctgctaaccgacgaaacgcagaataccgaagaggaaaacggaacttacatcttcttcgaaccggataatacattattcctgaattacagtttcaagcctgaatttattgagacaatgctacgtaactacacgtacctcaataccgggcttgccattatctataacggacaccgtatcctgtcgcgtaatggtctggtagaccttttgaacgacaatatgacggcaacgggactttacccgatcatccacctgaaaggggaagacatcgaaatcgccttcacgcataccggacaatacggagaagaatattactccttcgtcaacggtcagcataccacccaaggaggtacgcatcagagtgctttcaaggaacacatcgcccgtactatcaaggagttcttcaacaagaatatggactataccgacattcgtaacggactggttgccgccattgccgtcaatgtggaagagcctatctttgagagtcagacgaaaacgaagctgggttctaccaatatggttcccggcggagtgacagtcaataaatatgtaggcgactttatcaaacaggaagtggacaacttcttgcacaagaatgcagatgtagccgaagcgatacaacaaaagatccaagaatccgagaaagagcgtaaagccattgcaggtgtaaccaaacttgcccgtgaacgtgcaaaaaaggcaaacctgcacaaccgcaaattgcgcgactgccgtattcacctcaacgacccgaaaggaaaaggactggaagaagactcctgcatctttatcaccgagggggactctgcaagtggttccatcaccaaaagccgtgatgtgaacacgcaagcagtgttcagtctacgtggtaaaccactgaattctttcgggttaaccaagaaagtggtctacgagaacgaagaatttaatctgcttcaggcagccctgaatatagaagatggcttggacggactacgctacaacaaagtcatcgtagcaaccgatgccgatgtggacggtatgcatatccgactgctgctaattactttcttcctgcaattcttccctgaccttataaaaaaaggccacgtatatattctgcaaacgcctttgttccgtgtacgcaataagaaaaaaacaatctattgttatagtgaagaagagcgtgtcaatgcaattaacgaactaagcccgaatccggagatcacgcgatttaaaggtttaggagagatttcaccggacgaattcaagcatttcatcggtaaagacatgcgcctggagcaagtttctttgcgaaagacagacgcagtgaaagaactacttgaattctacatgggtaaaaataccatggaacgacagaactttattatagataatctggttatagaagaagatttggcatcatgagaaaagcaatattcccgggtacttttgaccccttcaccatcggacattattcggtagtggaacgtgcactcacctttatggacgaaatcgtgataggaatcggtatcaatgagaacaagaatacatactttcccattgagaaaagagaggaaatgattcgggaactttacaaggatgagcctcgtataaaagtgatgtcctacgactgtctgaccattgattttgcgcaggaagtaggggccaggtttattgtccgcggtatccgtacagtgaaagatttcgagtatgaagaaacgattgcggacatcaaccgcaaactggcaggcattgaaacgatcctgctcttcacagaaccggaactgacttgcgtcagctcaacgattgtacgcgaattattgacttataataaagatatcagccagtttattcccaaaggaatgaggataagttgagagttgagaaggatgcaggcgtatctgtgcccggttgttaatactcggctattaatataaagtaagattatgaataagattaaaatatacgtccttttggcttgcctgtgggcagtatcagccttacaggcccaaaatttcggttctgaagccatgcgcaagctacaaatggcagagttcgcaatctcccatttctatgtagacaaagtagatgaagacaagttggtggaagaagccatcatcaagatgctggcacaactcgacccgcactctacctactcggacgcagaagaagtgaagaaaatgaacgaacctcttcaaggtaacttcgaaggtattggagttcagtttcagatgattgaagataccctgttagtagtgcaacccgtcagcaacggaccttccgaaaaagtcggcatccttgccggtgaccgtattgttgcggtcaatgacagcgccattgccggagtaaaaatgagtacggaagatattatgaagcgtcttcgtggtccgaaaggttctaaagtcaacctgactatcgttcgtcgtggcgtacaagatcctttattgttcacagtgaaaagagataaaatacctatccttagcctcgatgcttcttacatgattcagcctaaaacaggttatatccgcatcaaccgcttcggagcaaccactgccgaagaattcaagaaagcaatgacaagccttcagaaacaaggtatgaaggacctgattctcgacctgcaaggaaacggaggaggttacctgaatgcagccatcgaccttgccaacgaattcctggggcaaaaagaattgattgtctacacggaaggacggactgccaaacgcagtgatttctacgccaaaggaaacggagatttccgtaatggacgtcttatcatcctagtagatgaatatacggcttccgccagcgaaattgtcagcggtgcagtgcaggattgggatagaggaattatcgtaggacgccgttctttcggcaaaggattggtgcaacgtcctatcgacctgccggacggctccatgattcgtttgactattgcgcgctattatactccatcgggacgttccatccagaaaccgtacgacagtactgtcgattacaacaaggacctgatagaacgtttcaaccacggtgaactgatgaatgctgacagtattcacttcccggattcactgaaagtacaaactaagaagctaggacgtaccgtttatggcggagggggtatcatgccggactatttcgtacctattgacactactctttatacggattatcaccgtaatctggtagctaaaggagctgtgattaaattcaccatgcagtttatcgaagggcaccggaaggagttgaaaaacaaatacaagaaattcgaatcgtttgatgagaagttcgtcgttgatgatgatatgctcgccactttaaaagaaataggagagaaagaaggagtgaaatttaatgaagaacaatatcagaagtcgctccctctcatcaaaacacagcttaaagcactgatagcccgtgacctttgggatatgaacgaatatttccgggtaatgaataccaccaatgagagtatacaaaaggcgctggagatactgaattcggatgagtatcagaagaagctgaaataaggtattcagtaaacaatcataagacaccatttttcagtttggtggacatatatactcactatagtgaaaaaatatctatcataagtatcattcattttgatagtttactcattatcaaagaaataagtatgatagatagcttttaaaaaaggtatctatcatacttttaccagcaaaaacaggttatctatcatctacaaaatagccgaataaaggccctatatgcataagatagcttgtttttgttgaatagtttaattctcccctgccctatatctatcagatagaacaaggcgtataaatacctcaaacaagcagagatagtttgcttttctccctgatatagtttatctttgttaccgatatagttcattcttcatgaccgtggcgaattcctaccacggccgtggaaagatactaccacagccatgaagagatctctccacggccgtgggaaactaatgataaaggcaccggaagacaactatccctatgccttagtctaagaataaaggcaggataacttataaaagccgcttgataacaaacaaacaacagctatataacaccctcccccctaagtccgaagatgatcgattagcttcgcaacaacaaaaaacaatgtccttataggcttgcaacggttaattaaaggtacgtagtaatgtataaggcgaaaacaaataaataatggcaatacaatttgaattgtacaagactccccatcccaaggatgaggaagacaaagaagtgtatcacgcacgtgtagtcaacttccaacacattgacacagactatttggcaaaagaaatccagatagcaacttctctaactgaaggggatgtaaagtctgttctcgaatccctaagtcattttatgggagatcgtcttcgggaaggacaaagcgtccatctggatggcatcggttatttccagataaagctgaatagtcaagaacctatcacttcgcccaaactaaaagcgaatcagataaaactcaaagccaatatcagctttaaagcggatgccaaactaaaaaggtcagtcagtgttgttcatgtggagcgaagtaaactgaaaccccattcggctgtcctttcaaatgacgagatagacaaattgctgacaaactacttcaagagcaaccctgtattaacccgtcgcgactttcaaggattgtgcggctttgcccctaccactgccgcacggcaaatcaaacggctaaaagaggaggagaagaagttgaagaatatcaatacttattataatccgatttatgtgccgatgccgggatattatggcaaggcggagataaagacagatgaataaaaggaaatcagaaaaaataaaaagggaaattcagttgtcgcagattttgcaacaactgaatttccctctattttcgtctaacttgtgcaaaaattacacaaattaattactatcttaattagcaatgggcaggcgtacaaatatactactcaaaaatatgagacagttttttatttgccctgaagcgttataatagaacgcgccggaatctgaactgtttttccacttttcactgtcctcaccggaagcaaattttccccttctttatccgaagtacgataaatctgccattgcgtatttcctacttttcctttatgaatagaaaactctttttcttcattggcataattaataactaccatcacatacgttccgtctacattcttataagcagaacacatcaatccttgctggtcggtgtcgccatcaggaatcaaagcgcccgtttgatcgaaagccgaaacggacaaccggactgcccccggacgaataaaacgactataattacctaaagcccacatcagtttggagtcttccactctgccattcaggaagttatcgtccgtagtatattcgcgaatcaatccatctttgtaatcaccgccaatggcacgccaccattgccaactttttgctcccgcatatacaatatcgtgatgaataatacgtgctacataaagtgccgttttcatggtacggtcgaaaccacctccgccaccgatctcttcatcattgcccataatacaagtttccgtctgccagaagtcaacattgtatttatctagtgtatcccgtagttgaagacggatattgcgcagatcgcttaaaggtgtatttgtccaatagctatgcccgagcatcagacgaggaacattcggagtatctcccaaatacgtatccacactatccgggcagaagaaagcctgaatctgatacccccgttgccaatccgtttcgtgagtgcggaacatacaacgataatcggaagactcattgaccagaatctgtgtatccatgtcccggtctacaaactctttgctcaacacacgaaccgtgcgggctacttccctattcgttgccggacagccttcctgcttcggaccgacccagttccagtgtccgtccggttcattgaaaggacagatatagttgaacttgacgccatcgtgttgttctactccctgcactacatctgccagaaaacgagcgtacttttcataacaatccggtttcaggttcgccgtacctccacgtccggtgttggtagccaatccgttctgtgtgaaatatacaggaggcgaattcaggaaagccagaaatttgttgactcccctttcttttgccagtttcaggaagttgcgttgcccctgttgcttgttccagtcgtatgttccgtcgggattcaggaaacattcggcacgcatccagggagaagcaatctgactgttctctccttgctccgtactacctgctccgacattgaaacgccagagtgacaggccgatacctttcggttgtccgttggcgtcattctccgtgctgaacagccagtcggctatttggttttgtttctcctgtggccaaagcccgatgaattgcatactccaggcatcggaagcactgaagtatgccatcgtctgacagggttggtctgtttctatctgataacgtatttcgggggcaggttgggaacatccacctgccacactggctattgagaagaagcctaaagcggctaaaatctttttacctttcatcctattcatctaaaatctttaattattcaaatcacacaatacagttctaaaaacatacaaacaatctattgaaatccgaaaagatataactaacgggtgggtattacttgtttaatgctcccatcttcattaaattccatacgatctatgcatacttcacgatgaacaccgggatcactcttcagataattcttattaatgcgatgataaacaatataccacttatcagtaccgggaacctgcaatatggaattatgagcagggccatatatttccttctccgggttttgaatcaatacgacagggctcttagctactttaatcggccccaagggtgatgtcgaagtgccataagctacatgataattaggagaaccagtatcgtctaccgaccacatgaaatagtaaagcccgttacgataaaacacataagcagcctcacgatacgcataatcctgtagcgttcctccttcgggagtcatcactgtgatagtctctttcttaattgaaatcatatcatcattaagctctgcacctgccatataaccgtttccccaatacaaatatgacttccccgaagctggatcggtgaacacgtccacatcaatctgttgcccgtgtcctgtaggcgaatccgttataataggatgtcccaagtcaacaaacggtccggcaggcgaatcacttgtagccactccgatctgctttcctcctcctgtcttaggatttccactgtaataaaagaaatatttatattgatctcctactaacttttcctctatacatggcgcccacgcattaccatccgcccaaggcacttgatctgactttaaatccagcatgactccttcatccttccaattcttcaagtcgacggacgaaaaaacagtaaaataccaaccaccccatccaggctgaccgtctgtagtagaataaatgtagtatttctttgtcttattagaatacaagatttcaggatcggcatgaaaacccggcaagacaggattccctgattgtgcgaaagcaggaaatgtcaccgctaacagcaggccgaacgcaattagagtttgtttaatcgttactatcattattttcattcattagataaagggggaaatatcaggttgcgatacttccccctcaagtattatattcttgatactatttatttcaatgctaccttaatagactgactatagcaatattctgatgatttgtccgatttgactcccacacgggcgtaaagatacgattcgtttaccaaaccactcgggatttcaatttcagctgtgttttcctgatcgagtgaaacagcattacccaacttcaactctgcttctttctgcttctcatccgtcaggatgcctgtccctagatagatacctacattttccatattggcattggcaaccaccttgttaatggtgaaacgtgctgtaatcttgttaccgtttttggcaaaagacacgtttctgacaaagaaatacggcgtcacaggaatatcctgcacagtgtttccttttacgctaatatagatcgtatcattagaaggtctttcccaaggtgcattacccatacgcaccaatttgtaatcaccattgaaaagcgatacggaataacttccatcttgggcaatatacaccggaatagaacctttcagagcataaccatcctgaaacaaagcaaattcggaacttccgcttctaacccctactgcctcaccatcataaatagcttttccggttaatgtggctttaggttcctcaaagttgtcgtagctgcaactgcttactgccaacaaacaacatatcataataaagaaaggtataatctttttcataatctcttattttttattggaatggattcttaacaatcgtcggattgttattaattacatcatcagcaatgaatgaataatagttggactgctggaaggttcttgccaccttgaaacgttcggatctggtctttacgaaaatgtacttgtcctgatcctgtgttcccggttttgcccctgcaatacgataaggatataaaccatatacgatagctttatcattatcaatatttccgttccaggtaatatcagctattctccatcgtttcatatcaaaataacggtgatcttcgaaagccagttccacacgacgttcgttctgaatcttttctattgtcaggcttgtcaagctgttggccgggaaaccggcacgctgacgcaagcggttgatgtagggtaaagctgtcggctcgtcattcaattcgaaagcagcttcggcggcattcaaatagatttcacccaaacggaaccaaggccaccagttttcagcgtagttacggagagtgtaaccggaagcctcactgataaacttacggatatagaatccggtgttgctcacattaggactgttggtttgaggtccgtcctgaccgacaaaagttttattatcttcataaaaacttcccaatttcgggtctgtcagcaagtcataagaaccggtcttatcgttccaaactgctactcctgcctgaatatccacatcttgatttctgaacttggaacccggatagataatcgtaccatacaaacgtgcatctttattggcaaaaatatcgcttggagtgtcatatactacataatcatcaccattcttataatgtaacgttcccggagttccatccagataatcgaaagcctctaccaatcctagtgacgggccgatgcaagaagagttgtcgttatcctctcttaaatgatgaactacattatcataaccgaagctatgcaccttcagaggattcttataatctttcacccaaattgcttccttattcagggtcttgtccataagcatcttgtagaagttcacccctttatctgactccttctcataaagttcatatccaccttttgtgataatctcttgcgaagctgtcaatgatttgcgatagtaatcatctgccatatcggacggaatacccacttctccaccggaagtcacaatattaggagttttcagcgcgttgtacttagcgatagaaccggcatacaacatagcgcgactttccaacgctaacgctgtgtaatagttggcacgagtctgactgcctttattacccaattgcgacttaatcgcttcacattcactatatacaaaatcatatatttcgtgttcctttgcacgcggattgcgtaaataagaaggatctccgctaaagtcatactccaaagtcgttgtaatcaatggtacaccacccatacgtcttacaagctcaaaataaacgtaggcgcggataaaacggaactccgctttgaactgaagtttctcatctgccgaaatatcggttccatacttatcgacattctcaatagacatattgatgtcacgtatcagtccgtaatcccaccagcgtccgtaatcgtttccataacgcagctcgttacgataattctggtccaatgtaccacaatacatcgcatcgtctgtttcacacataccaccggtgttaaaatcaccgtgcaactgcggaatacgattataaagattggccaactgcgatttaatcatgttcggatcattccataccaactcattagtaagaatgtttttgggttctctttcgaaccaactgtcaccacaactcgacaacatggaagtgatggcagctcccatcagaagtatttttatagatttgcttttcatgatcactttcgtttttagtatgtaatattaaatccaagtaggaatgtacgttgttgcggatataccactgcagctgcggcggtaatttcaggatcgactccaaacttacccacattgtcgaacgaacacaagttagaaacattcgcataaacacgtaccttctgtgcacggatcggtctcaacagttgagccggcaggctgtaacccacttccaggttcttgatacgcagatagcgtacgttgtgcaaccaaaagtcactattcttattgttatagctgaattcacctttacggatggccggataacgtcccggtatccattcactatccggatcatacaagtcggcacgatgccaacggtcttccaacaaataaaccggagagtttccgttgccatgatatgcattggccaactcatagttctgtctccatccttgcatagcaccaccggaaaggtcgatattcaagtcaatgcccttccactgcaaaccaatattaccaccaaatgacatgataggtgcccagccttcaggataaccgatggggcgctcatccataccattgatgatgccatcaccattcacatctttatagataaagtcaccgggaagcagggtgcggttattatttccatccaggtttaccggataattacgaatttcttcttccgactggaattgtccgataacctgatacccccaataaatacctccccaacggccttctgcagaattgcgatattcatcccaggagttattaaaacgcggtttgtaagtctcaatacttttgtaacgtgagaaagtaaagttaccgcttacagtatagttcaaatcaccgatatggtcggtccatgtaaccataccctccgcaccgatataagcttgtttgttcaaattttcgttaggtaacgaatagcctacttcgctcggaagcaatacatcatagcgagcagccggcacaccggtaatatccttacggaaagcatcggctgtgatcttcaaacgattattgaacatagtcaaatcaaaaccgatattcgatgtcgtattcttagtccaggacaaatttgtaataggcaatcttctttgattcagtccggtaaccagttcaccatccaatacagcgttaccattattccaggtataaccactcaagtaatcgaacaactttacatctttttctgtacctgtctgaccgatagaagcacgaatctttaaatcatctacaactggtctcaacttttcaaagaatttctcttccgagattctccaaccgatagatacacccgggaagaatccccaacgattattcgctgcataaagataagaaccatcataacgagccagtaattcgaccagatatttatgagcaaaatcgtaattgatacggccaatccatccggcacgtgcctcgtagctccattcatcaccgaaactgttaagttcatcgaactgcaatagcggcaaatagtcggtagaaggttctgtgccataagtcttcttagtccaatcgtaatcggaggcttcataacccaaaacagccgaaatattgtgattcttaatctgtttggcataattcaattgtaactgcatataacgcgcaggaacgctacgatcaatttgacttctccaacgtcctactgcaggagttccattataagtatctttctctttatcgtaggtataaatctgataagcatattgataaccgtcaaaacgactgttagtataattgtacgagaaagtagcctttgcagtcaaaccaaatgagaaatcatactgcgcataagcattgatattggcattacgagtcagattatctttatagccggcaatatcacggctaaaagctgccggattgtaaccattctcatgtacattattgatatactccggattatcattagcataaggactttcaatcggttgcattttgaacatagacaaaatagccgaataatatccatcaccgccaggcaaacctacatcttcggtcttttcgtatttaccgctgatctgtgcaccgatcgtaaaacggtctgtaatctttgtatcaatattcaactgaaggttagtacgttcatatttgaagtcacgcatcatagcatcctgtccggtatgagcaacagaaaggtagtagttagtcttttcagagccacccgtcacattagcattgatgtgatactgcggcacattttttctcatcaccatatcataatagtcataactcttatatcccggttccgtaccagcttcccatttcgccagttcttcggggctatatagcttgcttggatcttcgcctctgttctgcgctgcttcagccagccctcttacatattgtcccgcatttgccaatttcgggaaacgggtcaggttttgccagccataatatccatttacattgatacttaccttatcattctttttacctttcttggtagttaccaaaaccacaccatttgatgcacgcaaaccgtaaatagcagcagaagcatccttcaagactgtgatactttcaatatcttcaatgtttagagcattaaagacatcactaccggaaacatccgatgcctgcaaccagtcacgactattcatacctccataaggaataccatcaattacaaacagcggactacccatattacgaatttcgagattaattcccctacccggacgcgcatccacagcacgtgtagacacacctgctattttaccggacaacgctccggcagtagtagtagaaacagaacgtgtcaacgcatcagacttgacatcactgattgctccggtcaaacttttcttggtttgtgtaccataacctaccactacaacttcatccaaagtttcggtatcttcttcaagaacaatctgaagacgtgccttttcgccaatcttcacttcttttgtcttataaccaataaacgagactgccagtgttccattcttatcatctacattgattgtaaaattaccatcgatgtctgtaattgtcccattagaagttccctttacagttacattggcaccaatgatatcctctccccttacatcagctacatgtcctgtaacttgtgtttgtgcaaatgcaacagcagacagaaacagctgtatgacacatatgcataagattcttaaatacctcataaattagaatttaaagattaaacattttttgttgttttttcgaacacaaatatacgtcattgatatagactgaataaacaaaaatcatgcagaagagctacacaaatcatgcaatgaacgatttacatactctaaataaaatatttattcctatttttggatttgtaattgaaacaaataagcacgagttatgaaaaaacacattgcttctattctatttttattcttgttatcaacttttcagttgatagcccagtctcattccgtaaaaagattggggatagagcaaggattatcaaataattatgtagtcagcattacacaagataaacaagggttcttatggtttgccacagaagaaggacttaataagtttgacggtacccgctttactacttactataaaaatgatttgacacaggacaatcagggaatcaccggcaacgagcttaaccgggtgtatgctgacacgaaacgtcccattatttggatagccactcaacgagacggactaaatgcatataattataatgagcaaacatttaccgcttatcagcataacccgaagaatccacatagtttgattacgaatgacgtaacagacatttctccttccactcaacatgatgatggtttatggattagtacctattatagaggtatagaatatcttgatatcaccagcggacaattcactcattataataaaaatacagttcccggtctaccctgtgagcaaacatggacagtattggacggaggtgatgggaatttgtatatcggacatgtcggaagcgggttcagtattctttctcttaaagataaaagtgtaaaaaacttccggaacgaagccggaaacccaatgagtttacccggtaatgatgtgttttgtattataaaagatacgaacggaaatatctggttaggtacaaataaaggattggccctatataatgctgctaatgaaaacttcattacgttcaaaaaaaacaagaatgacaagtatgacactttatgcagtcgtatattatctatccgccaactaaaagataataagctttggattgcctccgagctgaatggcattgctatattgaacctaaaacaaagtatgtttctctcaccagaggagatttctcttgaatacatacaggaaggtgacgatagccgaagcctctctaacgcaagtgcccgatgcatatttcaggattcttttgataacatttggataggaacatggggaggaggaatcaattttatcagtagtaaatcacctttgttcaccacattgagctattctcctattccaaacaatgagaacagtctgaacaacaaagtagccagcagcctctgtatggacagacaagggcgggtttggatcggaacagacggcggaggaatcaatgtatttgaaggagagaaacgtaccgccatctataaaaaagagagtggagatattccttctaattttatattagcctctttgcaggattcaaaaggcaatttatggtttggatcctatgaagggggaatcagccattatgatagccggaataaaaaattccgttccatctctcttatgggacaatctaatctggatgtccgtacgatctatgaagatgcccaacacaacatttgggtaggatacagtggaggaattgttgtattgaaccctcttacaatggagattatccgacattacaatacagaaaacagcgaactgcaaagtgactttatacgctccatagctcaagatgagaaagggcgtttctggattgggactttcggagacggacttgggatatacaccccggacttacagaaaatcaaaacgttcactcaaagggatggtttctgttccaatactatcaaccagatcatacaagataaacaaaaaagaatgtggataggaacaggagagggattggtttgtttcctgtctaccgatgaactgaattataagacttatcaacggaaagacggcttgatcaatacgaatatctgcgctatagcagaagacaaaaaaggaaatatctggtttagtaacaacaaagggatcagctgttatgttacaagcaaagactgtttttacaactatggtcactctgatgatgtaccggcgggaagtttctcaagcagttgtgtaacacaaaacaagaacggatggatttatttcggttctatcaatggagtatgctgcttcaatcccgatatcaccatgaacgaacaaccagctccggcagcagttatcacagaaatgaaaatactcggacgattgagcaacctggaaaataatgacatgattatcaatttatccaaaggacagaatgtagaactaagtcatgcgcaaaatagctttggacttacatttaacgtacaaaactactcactagtcaaccaagtggaatatgtttatatgctgaaagggcttgaaaactcatggtacaccgtcaatgagaacaacagcgtcactttccgaaacattcctccgggaaaatatgaattcctcatcaaagcaagggtacataatcaggaatggccggaagaagctacttcacttaccatccgtgtcaatccccctctttggctgacatggtgggcaaagcttatctatattttggcatctatcagcatcatttatcttatcctgcatgcatataaaaagaagctggatttggaaagcctctatacgctggaaaagaaaaaccatgagcaagaacaggaattaaaccaggaacgtttgcggttctatactaatattacccatgagctgcgtacgccgttgaccttaatcctcggtcctttggaagatatgcaaaaagagacctcacttccggcaaaacaagcccagaagttatctgtcattcatcagagtgcactacggctgctcaacttgattaatcaaatactggaattccggaagacagagacacaaaacaagaaattgtgtgtcagcaaaggcaatatcgctcctctgatctatgagatagggcttaaatacaaagaactaaatcaaaagaccaagattgatttccaaattcagatagagaaagaagaaatgctccttttctttgataaggaaatcattaccatcgttttggacaacctgatttccaacgcgatcaaatatacggaacagggacgcgtcactctaagtttgtatcagacaatgcgcaatgaggttgcttatacagagataaaagtcagtgacacgggatatggaatttctgctgaagccctgccacatatttttgaccgttattatcaggaaagcggcaagcatcaggcatccggaacaggcattggcttggccctagtgaagaatctggtcaccctgcatgaaggagaaatccgggcagaaagcatacaaaacgaaggaagtactttctatatcagcctattgacggataatatctatcccaatgctttacacgcagattctacagaaccgattcaagaagatacgaatcaggaaacaagccttgaatatccacaagaaaccacactggataccggcaaaccgatcctgttgattgtagaagacaatgaagagatacagaaatatatcgccgagtcctttgccgattcgttcgaagtactcaccgcctacaatggagaagaagggaagcaacaagctcttagccgcatcccggatattgtagtcagcgatattatgatgcctgtcatggacggtatcactctctgccggcaattgaaagaggacgtacggaccagtcatatccctgtcatcttattgacagccaaggattctctgcaagacaaagaagaaggatacgaggtaggagccgattcttatctgacaaagcctttcagtgcttctctgctgcgtagccgtatcaataatctgctggaatcaagaaagaaactgatagctcaattccagacacaatccgttccgggcaatcaggcagatttaaaagaaaaacgtatcgtaatcgccgaagctctaagcaagctggataatgaatttattgaaaaaatcacccttttaatcgaagaaaacctctcttcggagaagattgatattacctatctttcagacaagatgtgtatgagcggttccaccctctaccggaaaatgaaagcactgacaggattatcgaccaacgaatatatccggaaagtgaaaatgcagaatgcagaacgtttattgcttgaagggaagttcaacatctctgaaatcgcctataaagtaggaatgaacagtacggggtatttccgtcaatgctttaaagaggaatttggcgtctcgccttcggattacctgaagcagatcatacaatcataaaaagggagagagccatttacatttaatacgttttgaaaaacgaattaagctcctaccgaaaaagaagagggtaaagtcataatgcctaaattaaaaggaaagagtccggtgctaataccgaactctttatttattttgttaatttataaacctccaacttttggaggccacttcaaacgatgcggcaggagtatttctctaaagaaaagcgttttaacacattctttataaacctgatttataataagggagaggggggaatctattaaaacagagcctgttaaacagcatctacaaaaagaaaacattacaagcagcagtcgtgcgaactaagtcattccctcaattcttcagtcattgtttttagtaatgacctgctgtcacttaacggcaaatccgtagctaaatcccaactcatcatacctttcagcttctgttcctttgcataacgggttttgatacgaatgttatcctgaccgtcaaacacataagtatctccctgatagatcacttcattctgtgcaggactcgtaaccaatccattctgtacaaaattgaaataagcctctgtcttctttgaattatctttggtcaccccataaaaaggaactcctgccaccagtttttccttcggaatgccatactccaataccatctgtatatccgaacaatatttctctatcggaaagcgaaccggtgaaggaccatagcactgaagtgaaataaaatcaactgcttcaatagcttccttactaatcttataacaaacaggatgcagagatacactgaaaagatacttgtctcccaacacttcacgcatcttcaggatagccaaactataatctttatattctttctcattttccgcccactcaaaatcaagatcaatgccatccagtttattcttttccagtacagtctttatgttctttgcaaacgtcgtacgagcggcctcatcggccaccatcgctttccattcgccactggaagctcccaaacgtattttcacttttgtaccttttacttttgcacgaaccgatttaatcaaaccttcccaagtggtcaccccttttccctgaaatgcacgtggattctcaaatgacaatgatccgtctttattaggatgaacattcaagaaaataaggtcgtcacttgcccgcaagctttctgtagagatacgaccacgattgtaaaaattaccccgcacataagaactgaccatatagtcttgctgtgcaaacaatgataatccaacaaacaaaaaaaagaagaatacaatttttcttagcattagcataatgattgataattaaaacgtttagattgcaaaaatacgcatatcaaagggaaacagatgttcaaaaacaactataatacttccaaaaatcaacataaagttttctattcagaaatttacaacagataaatattgaattctctaacatcatccaaagggataagaataatatttgcaggtttctactaaaacataaataaaagaaagagttccattttccgcaaaaaaagcctatctttgttccgttaagataataaatcatgcataaaactcatgccaggagattcattttgcatacaatataccaactgtacgggatgtccaaaaaatgttgagaatatccttgtatatagaaacttacctaaaggagagcatatccccaaggataagtgtacgcagaattgtatgctttttatgataaagggcgaattacttatcaatagcgaagagcatcccggaataacgttacgcgagagacaaattattttgcaagctattggctccaaggtcgaaatactggcactgacagatgttgaatacgttgtctactggttcaacgaactgcctttgctctgcgaagaccgatataaggaaatgatggaacaggcggaagctcctttgacctacactccactgattatgagcgaaaggctttaccaccttgtcaccagtatgcccgaattcctcgctgaagaaaacccttgcagcaagtatatcgacttaaaatgcaaagaactggttttcttgattaccaacttctatccgctgccccaactgggttcattcttctatccgatcagcacttatacggaaagtttccactatttcgtcatgcagaattacagcaacgtgaagaacgtggaagaatttgcgcatctgggaggatatacaaccactactttccgccgacttttcaaaaacctctatggtgtgcccgtatacgaatggatactggaaaagaaacgggaaggaatcctggaagacctacagcacaccaaaatgcgaatcactgaaatctgtaacagatacggattcgactccctgtcgcatttcgcccacttttgtaaagactctttcggagataccccacgcgctttacgcaagaaagcagccggcggtgagaaaatcgggaaagtacaataaacagcctcatcctactaatgtgccaatcagttgcaccatgcgtacatactggctggcatattgacacattggcgcattgatccattattaaagaattatttctttaattccttgctcaatcaatctatttcccctatttttgcagtccgtaagaggtgtaaaacgtcgaaattttagttctaacaattaaataatttaaattcaatcatttatgtggttaagtaattcatctgtaggaaggaaagtggtgatgagcgttaccggtatcgcccttgtcctgtttctaacatttcacatggcgatgaacttggttgcaatcatctcggctgatggttacaacatgatttgtgagttcctgggagcaaactggtatgcgttagtggctaccgcaggactagccgctctttttgtgattcacatcatctacgcattctggctgacaatgcagaatcgcaaagcgcgtggtagcgaacgctatgcagtggttgacaaaccaaaaactgtagaatgggcatctcaaaacatgttggtgctgggtctgatcgttatcgtaggtcttggtttgcacctcttcaacttctgggcaaaaatgcagttgccggaactgatgcacaacatgggcatgcacgctgatacactgacgctggcttatgccgctaacggtgcttatcacatccagcagactttctctagcccggtttacgtagttctttacctcgtttggctgtttgctttgtggttccacctgactcacggtttctggagctctatgcaatcactgggatggaacaacaaagtatggatcaatcgttggaaatgtatttctaacatctattctacgattgttgtactcggtttcgcactggtagtagtggtattcttcgtgaaaacactgatttgtggcggtgcttgctaaatagtaaattgtaaatgattaaattgtaaataatattatgatcaagatagattcaaaaattccagaaggcccggtggctgagaaatggaccaactataaagctcaccagaaattggtgaaccccgctaataaacgtcgtttggacatcatcgttgtgggtacgggtctggcaggtgcttctgccgctgcttcacttggtgaaatgggtttcagagtattcaatttctgtattcaggattctccccgtcgtgcacactctatcgctgcacagggtggtatcaatgctgcaaagaattatcaaaatgatggtgactccgtttaccgtctgttctacgatactgtaaaaggtggcgactatcgtgcccgtgaagcaaacgtatatcgtttggctgaagtgtctaacgctatcattgaccaatgtgtagcgcaaggtgttcctttcgctcgcgaatatggcggtacactagataaccgttctttcggtggcgcacaggtatcccgtactttctacgctaaaggccagactggtcagcagttgctgctgggtgcttactctgcattgagccgtcaggtaaacgtaggtactgttaaactgtatacccgctacgaaatgcaggatgttgtcatcgttgacggacgtgcccgcggtatcatcgcaaaaaatcttgtaacaggcgaattggaacgtttcgccgctcacgctgtagtaatcgctactggtggttatggtaacgcttacttcctgtctactaacgctatgggttgtaactgtacagctgctatctcttgctaccgcaagggtgctgtattcgcaaatcctgcatacgttcagattcacccgacttgtattccggtacatggtgacaagcagtctaagctgactttgatgtctgaatctctccgtaacgacggtcgtatctgggttccgaagaagaaagaagatgctgtaaaactccagaaaggcgaaatcaaaggaagtgatattccggaagaagaccgcgactattatttggaacgccgctatccggcattcggtaacctggttccgcgtgacgttgccagccgtgccgctaaagaacgttgcgacgctggtttcggtgtaaacaacacaggtttggccgtattcctcgacttctctgaagctatcaaccgtttgggtatcgacgttgttcttcaacgttatggtaacctcttcgatatgtacgaagaaatcactgacgttaatccgggcgaactggctaaagaaatcagtggtgtgaaatattataacccgatgatgatttatccggctatccactatacaatgggtggtatctgggtagactacgaactgcaaaccactatcaagggtctgttcgctatcggtgaatgtaacttctccgaccatggtgcaaaccgcctcggtgcttctgcattgatgcaaggtttggctgacggttacttcgtattgccttacactatccagaactatctggcagaccagatcactgttcctcgtttctctaccgatcttcctgaatttgctgaagctgaaaaagcagttcaagctaagattgacaagttcatgagcatccagggtaaagaatctgttgattctatccacaagaaactgggtcatgtcatgtgggaatatgtaggtatgggacgtacggcagaaggcctgaagaaaggtatcgccgaactgaaagaaatccgcaaggaattcgaaacgaacttgtttatccccggttctaaggaaggtatgaacgtagagcttgacaaagcaatccgtctgtacgacttcatcactatgggtgagcttgttgcttacgacgcattgaaccgtaacgaaagttgtggtggtcacttccgtgaagaataccagactgaagaaggagaagcaaaacgtgatgacgaaaacttcttctatgtagcatgctgggaatatcaaggtgacgatgaaaaggctccggtattgcacaaagaaccgctggtatacgaagctatcaaagttcagactcgtaactacaagagctaatcggtgaagttaaacatttaaaagaattagaagaaaatggataaaaatatatcatttacactgaaggtatggcgccaagctggtccgaaagctaaaggtgcttttgaaacctaccaaatgaaagatatccccggtgatacttccttcctcgaaatgctggatattctgaacgaacagctcatcagcgaaagaaaagaaccggtagtattcgatcatgactgccgcgaaggtatctgcggtatgtgttctctttacatcaacggacacccgcacggtcctgcaacaggtgctactacttgccaaatctatatgcgtcgtttcaacgacggtgacaccatcactgttgaaccttggcgttcggctggtttccctgtcatcaaagacttgatggtagaccgtactgcatacgacaagattatgcaagctggtggttatgtaagcgtacgcacaggtgctccgcaggatgctaacgctatcctgatcgcgaaaccgatcgctgacgaagctatggatgctgcttcttgtatcggttgcggtgcttgtgtagctgcatgtaagaatggttctgctatgttgttcgtttctgcaaaagtcagccagttgaacttgctgccgcaaggtaaaccggaagctttgcgtcgggcaaaagctatgttgtcaaagatggacgaactgggattcggtaactgtacaaacactcgtgcttgtgaagctgaatgtccgaagaatatttctatcagcaacatcgctcgcttgaaccgcgacttcatcatcgcaaaattaaaagactagaaactgctagatttcaatagcgagagcttaatttgattaatgacagaatcccctgccggctagtccgacaggggatttctttatgtatgagtagatcacaattattattaatacggatcagtaacatgaacttttaattcataagtttcaccgatttcaccttatagccagaactgttatgaatgagagaattacgggtgaaagcgaggattgaaataaggtaaaatcattcgttaccgctgtaagcgtctccgcgattctatcttgtcgcccttttttcattcttatatttttgcgatgtataaaaatgaagcattatggatttagcagaaaatcgatttggaaaaacttggaaacatttccttgaagtattgaaagtagactacaattgttctttagccgatgtttgccgcgatcagcataccacttttggtggtatgagttcctggatgtccagacggggctatagcgttaaacaagccaaggcagatgtggtccgtgattattatggcggcgttgaaccctcccaaccgacaacttcctctccttcattcactcaaatagcacccgccatgttgtcggaagaagagtttagtcttgccgggatcacaatcacctttaacagtggaaccaccatttcagtcaaacgggccacacccggtggtgtgattaaaatgttgcgcgattacgaaagaaaggagggagatccatgtattctctaacatcagccaatcgatactatctgtaccagggctttgttcgtatgaaccttggcattgacggtttattcaaaattatacgatcggaaatgaaggacttgtctcccgtttccggagatatctttttattctttggtaaaaaccgacaaagtgtaaaaatactgcgttgggatggcgatggctttcttctgtactacaagcgcctcgaaggtggaagttttgagttaccgacatttaaccccaatacaggcaattacgagatttcttatcaggttttgtcttttatcttaaatggagtgtcattaaagtctgtacggttgagaaaacgttttaggatctaattcaacattctgattattagacatttgcaataaagatatcatccggtttatttggctaattcgttgattttttatatctttatgccatgaaaaaggatgagatcatagagttattgaaggaacaaatcaagggattacgagatgacaacaacagactcttggaccaaatagatgctttgataaaggaggtttcttcccttaaagaggcactccttcaaaaaggcgaatctcttagcaagcaacagcgccttattaagggactcgccaaacttgtatccaacacatccgaacagcaacaggctccccaatctgccatatccgaagaagagcggcagaagatagaagcggaaaaagcagataagcgtaaagcaagaaagaacaatggggccaaacgtgacatgcattatgagatggaggaagaagaacatgtcgtttatcccgatgatcccgattttgacatcaataaggcccggttgtttaccactgttcccagaatatgcgtccgctatgaatgtgtacccatgcgcttcatcaagcatgtctacaagatacacacctatacacaagaaggtcgcctgtttgagggaaaaacaccggcctcggccttcttgaattccagctatgacggttcatttattgccggattgatggaattacgttatatacaatcgctacctgttgaaagaatcatcaactacttcgagagtcatggctttacgctgaagaaacctacggctcataagttgatagagaaagcctcaaacctcttcgaaaatctttataagtgcatccggcagacagctttgagtgatccttataaggcagccgatgaaacctattacaaaatactcgtcccggaaaagaacagcaagggaaaaggagtcaggaagggatacctttgggtggttgtcggcataaacaccaggatgatatacttgctctatgatgacggctcccggtctgaaagagttattcttaacgaattaggcagttgcaaaggtatcatacaaagtgatggttactcaccttaccggaagctcgaaagcgatgcttatcccaatatcacacgcatcccgtgcttgcaacatataaaacggaaatttatagattgcggtgagaaggacccggatgcaaaaaggatcgtggagctgataaacgcactttatcaaaacgagcataagcataaagttggggttgagggatggacggtagaacagaatcttatgcatcgaaaaaaatatgcgccggacatactcggagaaataaaagatgtgtttgatgaaatagaagaacggggggatttattacctaagagcgaactgcaggaagccattacctatcttcgcaatgagtggaatgcagtggtggacatctttaattatggtgacacttatctggacaacaatatggttgaacggatgaaccggtacatatccttatcaagaaaaaactcattgttcttcggcagccataagggggccgaacgaggcgccatactctatacgatagcactcacttgtaggatgcataaagtgaatctatttgagtatctcacggatgtgataaacagaacagccgaatggcaaccgaacacaccaattgaaaaatacagggaactgcttcctgacagatgggaaaaggctaatgactaaaaagggatcattagcctttttattttaatacactatatagaatcgcggagacgcttacttaccgctttcacctgtcttattaaaatatcccttgagctaaaacaattatcattatagctaatccggatatgcttatagcaaatccgctttcaggtattaatgagtgaactgtgcggatgtaatactttggccgccaagtcttaacaccttagttctcatgtgttaatacttgagttgttgcatctatatatctagcatcttggagctatatatccaacaccttagagctatatatccaacaccttggagctatatgtccaacagtcggtatgaataaactcaacaggtgaaaccgggaaggttcagtttcgcctgaatttctcccttgctttcacccgctgttaccttattcatcggcatttagagaattggatgaaaccggtgaaccgcaattatcttacatagttgcatttatgaaatgtcttgcctacgtaaattacgtggagaggcaccaaaagatttcttgcagaaattagaaaaatggggtaaagattcaaaaccatatttatagcatatctccgaaatgctatattcggagttgttcaagtcgtccagaatgccctctttacgtctcgccagcatccattcataaacaggttcatgaaagacgttattgaagatacgacggaatgtactaagggtatatccacccaattgtgccagttcttccactgtctttactttcttatagttttgaataacgaagtattggaaactatttacatatttagagagtggatgcaccaagctcgaaagatcataatcggaataatagtatcccaatacaaacgccaattcttttcgtttcagagatagcaaatcccgacagactttatcccctttcagataagtgatagacccattaaggaaatattgcagttctggaattatttttaatggagtataaataagtggaggagatacttccttcatgatatgattgaaacggaaatcacaaaacagttcgggctggataaaacgataataaatacactcacattcagtcatagcaagcatctcaaacatagaaccaatagcctgaaggataaattcaccttccttaagcattgtccccgcatattccttactattgaccagtatttctcccttcatcaaaaaaaggataagattttcttcacacttttgagccggtttatgaaaaccacgctgataaattacatgagtaatggcattgctcactgctttcggacatatttgacaatcccaagttccttgacaaatagatggcatacgctgactgtgtttgtttttgtttatgctgccagcaaaaatatatgaaatctttcatattgccataaaaaaaggaagaaaagtgaaaataaaccttttactatcacgaaccaattataagacagcccatattatatacaaaagcagcacaaagtgaatacttcatgctgctttttattaatataattatttaactctatatgaaagaacagtatctatatttacttaagatcatccggttgaggctccttatcagcccaaccattgtttacaacctcacctgaaatattcatgatcttaccaggggttaaagcaatagtgaaaacaattctttgactcacttcccactggtcagtcggtacatttacttctttaggagcattattatacacaatattcgttgtcttatcagtagcagtatatgtaacctctatttttgcactatttggagcttgaggaatcaacatcagcactttatcattacctgtcaattcgacagcatctgcaccatcaccgacaaatgttgcagcagaacttaccatatcaatcgtataatctttcgttccagttgtagactcccatgtattcgttccccatttatatgttccaacattgttaatccctttcagaactaattttgtaacagtgtaattaacatttgaatcactccctttcaacttaaatgcaatctgggtcagagcatgtttaaatcctaaagaaataccatccacattagtagttccattaccagtcttatcagcaaccaaaaaatctgattgactagcaatatcatcattaactgtataaacgattgtaggatatcctttagaactttctggagcagtataagtagtccctgtttctgctacagggctatatccaaagaaagttacattaccttcggatggccagtaaaacttattgctatctttctctgaccattttttgtcttctgacttattaaaaattccttcaacaagagttttactttcagtctcagtagtaaattcacctgtatgcgcatagccatacactttaaactgcttaaaattatcagtaatcatagcagttgctcttgtaacagcagctgtactaaaattaatttcggctttctgtgaaggggagtcaaactcttcattctgtgagcaacctgtaattgccaaagcagctgttactgccaataaaattttcttcataactgtattttttaagtttataatattgttatattttgtttatagcatttatttaattcacgggtaactcaacattatcttcgggcccccattcatcaacattgccgcccattcctccacctccatcaggattcggtggtgtttccggcttatcaacctcaatcttatcatcaggcggtaactcaatctccggtggtggggttggttttccatcttcccctgttccagcattttcaagtgtacctattatttcagtaacatcaattgttgcttcctgaactgtattatctgttttgataaatttcaatattaatattatagcatctttctcactagaagtttctctctctgatgttgacattcgcgtcggcattgtcatttcctttacttgtttgaaagcggtgaaagatgccgttaccttattgtctcccttccttacctcaaagtagataggttgtgagctacatactccacgacctttgcctatacagtaacaatcggataatccatcaatgcttcctaccactgttgcaacatactccaaacctttagcctctactgcaaaagaatatttcttcaccacagattccaacttccagtctaagcgaagcacttcttcactcttctctattttcagctcatctatattcaacacatacaatgaatccggtgaccaaaccatcttttccgttccttcaatccctaaaccattacagtttcccgtataggcttctatcgtttcataagactcttcgcccctgattcgtatagattccgtgttatagttgtaggctactaccgaatacctccccggaggaactttcatttctccacctcgtaccgaaaggtatttatctactttcctgccatctccgttcttcggataaaaaatcacccgaactccctccggcagttgatctgtcactccatcccaatccagctttatatctaccccacttacgggataatcatccaatatatcgcgacggctacatccagttagcatcagcagcgaggacaaaagcacaagaaacccgtatcttgtatttcgcattacgccctcctatctctttgttgttatcaaccataccaaagaaactttcgccttggtaggaccaataaagttataacgcccactatttgtccatataatatctccctcataaggagtatattttttatattctgttgtcaaataccctatgccaagactgaattcaagggaaaaatgccgtgccaattgccgtgcatatccataagtcactcccgcagctccgtaatacttaccttgatagccgtctccacgcagctggaagtcatatatcccgccttcagcataaagtccgataaaatgtccggtcaatcggtcgcgtttctgacggtttcccagccaacaacgtccttccatccctcccgaaaggagctgatagcagaaatcatgtttgctattcagccaccacggacatttatattcagtattcaaagaccacctcttgcctatcggaatttccacttctatatttggcgccaatgccaaatcatataacagattattcttcactgcaagtacagtttggcttttcaccggcccttctgcctccgatatatcgacctcacaggcctgtttttcttcactttctcccacaggcttatcaggttgatctttcggaagcgcctcttcctgctttgaaacaaacaacccggagacagaagataccggttcaaaagcctctttacctaatttcgaagtttctccgacaatcgtaataaccgatcttcgcagctccggaaagatattgcgaacaatgtatcggtaagcaattccccgattcaattttcgcaacagttgtttccgtttattgacatcattcttatgataatcaatcaatatcagcacttcttcccgatctggcaagttggagtcggatgccaccaacttacgaaactccgaccaatcctctccctctgaaaaaaaatgaatcttatcaacactaacatccgaattataccgttgtaagaattcctttatcgaatcatttctccgagcagccaaacttctattataagattcatcaccatcaggagaaacaaaagttttcacattcagcgctgttatatatttcgtattcaaattcccgagaagcaaagaatctaaaattgtaattgcctgattattatctttataactaagatccactttcgcttcattcgcatcaaaatatatcactgcccgccggattgtatcattcgcaacagcgaaaaatggaatcgaagcatacccactttctggaaggcttaataaagccataagaatagtcaatatatagataccatggttcattgtcgttcgtttctgatgacaaatatagaagttagaaaacaaaccgaatcatacttttagaacaaaaatcaagacatgaaagattctgtgaaacgattgaaacgattttgcaagttttgagagtttaaggtcaataataaacagaaaaaatgtccttggtaactcatctgcgtgataacaccgtacttctgttccgcctgcatcagcagttcacattcataggaagttctgacaaacggcttttccacatacacatggatgccaagcttcatcgcctctatacaaatcgggaaataactatgatcgggagtcgccaggaattttctacgagatattttatccccacccaaaaatttcattaaagaaatcatgtatcaaagtgggtttatgaatagatcacatttctataaggagtttacaaagcggatgggagtggtacctaaagactaccgtttgcataataaaaaatagaaaagctacaaaggtctcatatactagcagcaatatcattcctgatctgctgaattgcaagaagcaatccaggcagatgcacttttactattttaaaaatttcttcggggtcaatagataaatattcatgagaaataatattgcgcagtccaataatgctcctccatggagtaccggcataatttatcaataattcatgattagtcagattatcaatattcttaacagtttcacctatggtttgcaaacgcatacaagttgcatcaaaaatatccatcttatcaggagaagctaagaaatcatttacagaaatgacactaccacatctttctatagttgtattaatacgttcttctacaaaaagaagcatatccaatatgtcagcattagatatagattgcatctttctctatatgattgcgaaataaactacgcataattgcggttaaagacacgacatccacttttgcattaaaacgctcttctaatgactcttttatttccattcgagtaaaataatccggatcttgaagctttacacaaatatcaatatcactatcctctttctgctcaccacgagccacagaaccaaaaagtcccaacttttcaattccatatctctccccaaattcttccttaaaattccggagaatagcgattatttcatcttttgttttcaattgacactattgttataatgcaaatattaaaatttatattggaattagcaaattcttaatcatattttgtagtatcactaattaaaaaaagatgcacaggtcatcgaattttcatcgatcccctgtacacctactactctaaattctacttcaaaacataaatagcctaattatgctgccgaatccattattaacaatcatgttagttttatccatcaaaagtacagaacataattacgtaaatagttcagaagtgcccagaacgccatcatcattgccaatacaaacaaaacgacaaatccgattgccaaagcaatccaatgttgtgaatgatcatcagaatattctttatgaccatcattaaacttgtatattgtccgcactgtctgcgctcctgccaataacccgaacactccggcaaaaataccattatgaatatttccaccgccacgaagtgcccgcttatcaattaagaattgaggcgtcctgctcgctaccacatacaaaccggtagctattaaagtagaaaacatcataccgactcccatcatccaatacatcaagatacccacaatgacacctaaccagattaatttcctggaaccatcaaaatgacgttcttcaccactattaatcacatcagtcaatgagtttaagcgttctatgacatcagcgtcagtaggacacataccgataacctgatcaatcaaaagaacagatttcttaatttgcttcatctttgtcggctttctgaattcatcatcatctgttttttcaatcaccgtccaagtagcgaatgcctcatccatcagtttccacgcctccgttatctcttcatccgtcattttctccggcattccggctgcaaggcgtttattcaacattccttctaccgtaaaaacctctttataacgtgcgcccttataccatacaaaaaacatatgccccacaataaataaaacaacggcaatatacaaaatcagttggagaacagccaatatctttactcccaaaggaactccgtcatccgccgcagcatcagctattgcatcagctccactaccgctttttacaagtgtcaatccattaaaggcagcatcttttccgcctttatcaagtccggaaaacgacaacttatcatccttataaacgactttgcattgaccggaaatcccggcatcaacctccggacgtccgcctacaaaagaaagagtcagttcattcccgttcatactctcgacgtaaaactcataagttgccatcaaagattcccttccaccgggttccagcatattcacttccataaatccattgcatctggcattctcattataaggattcaattgccaattaccatcacaattcaatgtgaacgcaacctttaaatcgccttctttatttgctcctagccagtcaccgctaaaaacatcttcctgcgcaaatgcagtcatcgaaataaccatcattacaatggcacacaaatactttttaatattcttcataatataataaaattaatatttcaacactttggctgccacgttcttaaattgcggcatagcaagcccgatagaagctccaatataagtcggatcacaaattatgtacttctttccgcttacagttatataatctccgtcaatgttttcatcaaaacagaccgctgttgccatgtgattgggatattccaacaatacaacatcaagccccataagagtacgtaccaaataagagtataacacagcacggtcttcgcaatcggaataaggatagtagaacagctcatccacaaagaaaggcttttcataaccaaactggtcaccatctgtcttataatcaaaagctgtctgcacgaaattaatcagtatattagcggcttccgattgttttttcccttgtacggcagcttgcaatgatggaagcaccgtctgttgtacttcctgactgacaggagctcccacatagacagaaaagtcacattgcggataatccttatagaaggaaataagtcccgaatttactttcgagcagactttgacggatggataagctttcgcttgcaacgttttctccacgtaagttcctgaaaagggttgaggagcagtgatattcatatttaccgggttcttcgcattggcgaaatcacggttgtaagtgtaaatagaattagttttatccggggtagtatcaaacctgtaatagtttactccattcaaagttataaaacaggtagcataaatcatgttacccgaagcatagaataaagtaaggcggttatccatacgcgccaccttaaccctatatcccgattgagaaaggagaaacatttgcataagagctatttcatcggaatgagtacttccacatagttcagtagcaactttcctcgtcaacagcagataaccatagtcattcagggcattatcctttttaaaagccagacagtcgtctatcaaaggctgatagttgctacgcgataacgtctcccatccggcagaaatatctttctctgcaatcccttttaaagtgagccggttcttcaatgaagcattgacaacacaatctttactgtagaacgaaaactctacaccggaaagtgagcgtttggccggaacggtttcttcaggcttcacttccggttttatttcagggagcaccgcaaaatccttttccggttctacagccacatctttacctcccggtacaaccggaacctgtgttttcccctttgaaggagaaaatgtcgcacttggagtcactgtcggaatggggagtcgtgtcacctcccctactttaacctcttgcggttttgttgccggcttcttatggtcaaagctgaccggttttacaggctccggcctttgaggacgtgccaccggcttctgcaagtcatactctttccaggtttctttcagaaattcggcaaattccttattctgttcgctcacaaaatcatcaaactctttttgctgctgcttcacaaaatcgtcaaactccttcatgtctttatctatttgcgcaaaaagactaaacggcaaacacaatgaaaaaactaccatagatagtattcgtatcctatttttcctcatttccttattatattttgttgttctgttatctgccaatccacatacagcttattattccgtatatctttgataaagggggaaatggacaagacagcgacaaccttctcccgatacaaaccacaaccggaatcagtgctgccattgaaacgatcgtccacctgcttgacatttacatcagaaaacggatataacaacagtgccttcaccaaagaagacatataggcattccaaaaggcattcctcatatccatcttctccaatccgtcctgacctccaaaaccggcatcttcataccaacagccttcctgtgaagaacaaatttcaactccgttcatatatgaaattatttgaggagatgactgtgttcccttaagctgaaaccatgactggtctgattgctccctacaactatccgattccaacaataaattgaatttcacctcttcttcctcaaccctttctttcgtaaacaaaagcatcaactcactaatggaatgataagaaaaatcgcaactatcattcgatggagtaaaagatacctccagaaatttctctccaaatatagaagtatattcatgctcaatccggtaggaaacatgttgaacgggatgttcgatcactcccagtacaagcattttgtttctttggtcttcgtatgtattactggcagtctccatggtggaaaaaacgtccgagagaagtctcaattgtaccccttgctgcaatgaatacagataagccgctctttgcaaagcaagcatccttgcagcttcggatttcatacaaggatcagatataccaactacccggcctttccgttgagaagcaaacacccattccggcaaagtctcccgctgtcccggtctccagtcataagattggttataaactgtatcaacaggcattgcctgtgaaaacacatcaataccgggagacaaaagcaactggataataaaaataactacccaattatatcttatatccgacaaattaagcttcatcattcaatcttcaaatagttgggtagttattaaagagatcattactatccgcaatgttttaaacaagctgcttattgggcgtttttactcatttcttcttcaaatacctttttgaacttttcatattcaaagtcaatgcgcaatttgtcatcattcttaatacgatttgccatagcattcatgatttcctctcctgccagttcaagagagacatatactttgtatttaccatcaggagtcttcatggttttttcacaaattacacgcgtaccgctcaattcctgttccactaccgtacgggtcaatgattgataacgacttttgctttcatcattttcatcttgctgataagaggaaacataactatcggttaccgatttcacttttgcattgatagcagtagcaatttcagcccgggcctccgtcatcgcttttttctttgcaatagacatatccgtagaaagtcccatcgaactagctctaaaatactctttgttcgtttgaaattccggtcccgaacaaggaacattaatttctacgtcctgttgcactgccggttgctgcactgtttgtgttacaggttttgaactaccgcaacttgtcataacagcaatgattagcaatgctgttcccaataaattaattcttttcatttcaagtcttttttaatgttaatatatgattcatttcaagcctctcaacttcactatattatttttgaaatccttcaattgcagcagtgccacagattgcaacttacttacctcaataaccatctccgtaggcagatcaggcacaatgagcgcagtgactctgcggtcattgaacttagaccccagtttgagactgacaatcggagattcttcacctttttcgtttataaccgtcagatttccactatataagtccacttcgcaatcgtcagcatttgtattcacaatcttaagatgtatcctcgatttgtctcccaaagttgcaagtttgtcaaattcaaaaaagacaccatccaaccattcaacccgaattgccttttgattctctggtttggcggacttaaccggaaccaaaggagcaggaataacttccggcaccacaacagggacagatataaccggatcagcttctttttccggtacggaaggaccgactaccggaacaggaacatccggcaacatcttctgtctttccggaatctttccggttctgtcgaatgttattttcttcaattcacgtgcaaactcccggttcagccgttttatcaattcacgcgccgccatattcttgccttgagaagcggacttattttcaggtactaatgtccgttcatcattaatagaataattcaataggatttgccccgtccggttattttctattttaatccccaacgtagaaaagaattcgatgaagttatacagttcacccggaacggtattgcctttacgacacttattatccaatgtaacgataatgtcggcttcagaaggagatgcaactacgttaaagaaatgattgttcagcaaactcttcacagttcgttccaccgcctctatatcgctctgcgcacttctaacataagcagaagtctgtgtctgcaccgtgttgatagtcaacgttgctccgggaagagaagaaagcatttgtttgaataaagctgcataacttcccttccggaacaagctgaacacatcatcaattaatgaaattccaatttcctgctgtgcctgtttagaagtaatattgcgcacataaagagcggcaactcccgattcgtcggtgggagacatggaagacaaatctcccgacccggaaacaaactcggctttcaaccggatattccttaacggatttccattacggtaaacacctatagcaataggctcccttataccttgaaacggcgtgactgaaacggttgccggattcagaacaatcgttattccatcaaatactccagccaaagccgcatatagttcagtcgccaaattaattgtctttccttcgtaagagcagaacaactcctgattaagcaccgggcgtatagcctccattccattcgagaataattcaacggcagtcattaaatctccctgttgtaaagtaatgtgtcccttataccaaaaatcgaagccgttacggattgccttctgacgacgtgcttccaccaaggccgcataatcatccttattcagttcataataaacccaatactcattgtcacttcgccaggaatccaccagacgaaagttctctatttccgcccgggcttctgtacgaatactctctgcgaaggtttgtttcacattaccatcgtcctccaacgtattcaacaaagaattggcggcaatcaccacttgaatttcagatacaagatcagacaaagcgttttgctttgccttttgctgataatctccttccgatatttcagccattcctattccgatgtaacttaaaccactaacaggatgctgtttcacccagtcaggacggttcgtttgttgaccggaaagcggaaagcaaaaccatgaaatcacaagaataaataaaagccaatgtttcatacgtccttgatttattgaatagtcaaatagatagtacttccatccactctatgttcactatctattccggaatcattcagataattaaccagattatccgcaaatgtgatgcaatccatcggcaagccgtcgctgtcctttgcaggaatctgtatcgaatcaaatatcagactatcgtccacagcaccttgaatatggtaacgtcctccctgggcattttttcgtacccaattgcgtatatgcgccgaaagagtagtagtaccgtttatccggctattcatcgtattgatagcattatctgcgagactaacccgaagaacaaccgtattcccctgttgaactttccgggcaaactctttcgagatatctttcagaaaaccatccagaacatcttgtgccgcgtatgcgcataacttatccacgtccgtcgtcctaaagcggttcgtccagcttttccggctagccaaatctactccggtagccgtttcacgagcagtcataatcaatgagactctacttcccgaagctgcagatatgtctttttgtaaatcaaccatcacatagacgtccgctcccgaattcatcaacaactgcttatcattggaatcagcattcttactttcccattcggaagcgcgcaaagttcctgactgttttccctcagcagccaccgtcttcacgccaagcttaacaaatccctcctttaccgtacttacggctatacgaagatcaaaatcattcttcagaatatcggcgtatgagcttcggtcattgcttttataggggactaccatgattgtcggcaaagccatttgttgccgagtttcctccatcgacatttcttcctggggtctcgtcatcaatttattccgtatcaagtcttttttaagcgcacctaataagatttgagccgttactgtacctttgtatagattggaagattgccgtaccgggtctcctaccgtttcatagttcttcacaaaaagcatataacgtgaactgaaaaactgattcatatagtaagaatcttctttcccgacgagcggctgtccgttttccactccgtcaatgccgttgaggaatatagcattaaagatcgacttcaatgccatattatatacatccttctttttttcggctgttccggaagcggtgataacggctatgttatcatctgccttcacacaagttacgtcattggagtatgactcctgtgccatgaaatgaatagtgtatacaactagcaggttcaaaagcagtattcgtaacttcatcatagtccaagtccgcctaaaaaggtattttttcgagaaagaataatcaatttcttttcttctttcgatgctttcattatctcctcaccgcctttgctcacggtacataaagaacgtgttccgctcaatacttctttcacattcaagcgtccgacttctttcaatgacagttctccggcaatatccatctctatgtaaacgataaatttctggcctttttgtacccctctcttggttccaagatcgatatatacagtttgtgctttatcttttttggtactctcaatctgtacaatcgttcctttcattttgaaatactcgtcaacaaaatcgtccatgcttattactacataatccaaagtcttaatgatagcttcatcaggagtatcgccaatattcccggtcagcccctcgtgagtgaatgtctgggttcctttgagtgtaccgttagaagggtctactattttcaacgtgtaagaaacactcccctgataataggtcttccctttactatctgtttttttaactccctgcatactggtaatatttccctgaataagatattgggcgcctaacgttgtcatgacctcgcttctgcaaacggcatctcccatagcagaagcctcttggcgtcttttcgcttcagtcttcaatgcttcattagaatcaacatcaataagttctacacgacccatcttctggataccttctattactttattacgcaatgcttccgccaaaatattactgatagtaccgggacgcgagaaataatcaatatagactctttctttaccgttttcatcggtttgtgcatagcctaacattggaattaggcaaatagagaacaatagtaaaatcttcttcatgtctgtttattatttattattaatgctatgtttgttttttagtgcaatatttcgctcttttaatacaatatagaatgttcttttttcaataatgatttactgttatgaatgattgtgttttctctgactgcaaagttaagcacacattaaggtgtattgtatacacaatatttactacaaccatccgttaaacgaatagttatctccaaatatcaatgagaaaagggaaaagagtggtatgttcaataaaacgaggtcgttttcccgtctccaagctatttgcaccatcgcattttccacagttctctcgaataagtataaaatagcatttgttatatccactaaaattgttacatttgtccaataataaattgcttcccaataacaagatacatggaaacagatttaaagaagatagtaggacatcggctgcaaatgcttcgtatggaaaagaatcttactcaagaacaaatgggagaaaagttgaacttatcaacaagtgcctattgtaagattgaatatggtgaaactgacctcacgttaaccaggctaaataaaatagcagaagtactgaatatgtctgcattagaactatttaataaaatagacgggaatgtgtatgtcaataattccggtactatcggaactaatattggagtcgctaaagactgtagtagcgtgcatatcgaagcggcagatgatcttcgtgagctaataaaagcaaacagtcggctccttgacatgttatataaacgtatagagcttttagaaaataaagtgctcttatagtgattatacgcctagagaaatccctaagacgatgtatcgcctatccttccgtcttccagaatcaggagaggaaaggcatatcattttaggaatgataccagaacaggaatagatatagttaactatcaataaaatacaaatagaatatatgtcaatgccaatacgatcaaaatataatccgacttcatctttccagttaaccttagcatatacactttttgttgtttataaccatcaggagaactataatttggcctatttatagataatcagtttaggtttatggcaagagttgtagtggtcatcaagtattgccccatttgagaaaatgatgtgctcatccttgaatgtaccatatccttcatgagcgtgaccgaacaaatgataatgtggctttacctcgtaaaccttgtttcgaagtaatgcatttccccagtaaattcctgctgattcatcaagtatcatgataggaggttcatgagtaatgagcacgtcaacatcatttggtatcaaagtctcaggatggttatatgccaaaccaaagaacttaataccatcaatctcacattcacaatcttgaaggaagtatacattgttaggcaaatcttcaatgccttcagcctcccaaaggcaaaggtcatgattaccagttatgaagattttgtgaggatagggtaattcgacgaaccagttgagaaagttaagcacttcttcctctgtaccattgtccgtaaaatcgccacagtgtacaatgacatcagcagctggaagatcggtcaattgccgatgctgattatgtgtatcagaaatttgaagtattttcattttacagaaatatgaatgtcatgtatgtcaacatcaccttcgtcgaatataaagtatgaagaaattccactaatgctatcatatcgtgagttctcatctttatgtataggtatgactccaatacgaggatgaacagtttgacagacttcttttaatgtttcaacatcagcgtgtccacttgtgtgaacaccatccattgttccatctaatattctattgccaaacagattacggatatttataacatcgctatttgtgtagtctttaccctcttttgcatagccaccccacatagaatatatcaaccacggtttttcatcattatatatatcgagcattcccttaagcaaatagccactgctcattcgaattggcattaagaacccttccttctgtagcttgtttctaacattgacagttctataattgattagcttgaaagcattaaactggaataaatcagatttgcatcctgcatatttcgtgaatacattaaggaccctattttgatactcatcaactaagaatatacgtccagtctttttacacgccgcatggaatgttgcaagccggtcaaggtcagttgacgaacacaaggcaaagacatacttgtgttcacgcaatgcctttataatattcttctgtatttcgctctctgaaatcacacattcttgacttcttcctaacattgttccttctgttataagtatgtcaacttctcccacattcttcttcaaagtaggaaaaagacctttgccaatatagccatgtctgcgaaaatctcctgtgtgcaatatcttctttccctcacattctattaagaacatatatgcatcaaaagcagaatgactaacaaaatacggagtaacgaaaatcttccctttcttactgacatcaatacgttttgccgcacaataggtttccatacgctctatcgcttcaatctgtttggagtaatctccgtgccccctcaaagcgtcatatttgcagagcataacttcttttgctcctactcctatatattgaaggacatttgttggtatcagatggtgcaaaccaacatgatcactatgataatgtgtatagaatacggcatcagcatttcctatgattgattttacttgttcttctgtcagttcttcttttttgcaaccaggaagattgctaccgaagtctataagaattttacaattctcagtcgatatttctgtaatacaaccacctatctggtcagccccacgatgaataataagattcattctgttttctaagttttttgatgtaacgagagtaccctccttaggtgtgcatgtgtatgctttcatttctggcaaaaataaatcacgaataaatctatatctttcgcagattgttttagacaaattactgtcttctcccacaattacacacggtattattcttccggaaagctttaatggtattttatttttgtaactggaaccgataagtccataatctattttttgctcgatcattgcttttattcgttggtacaacttatcatcttctctagctaatttttgaaactgtagatagtaatatgaagtttgaatgggcgacaatgcagtcttagtaggatcattttgtttaagttccattatcaatatatctccattagtatttagaccaaggaagtcaaattcaccatactcaggttttatattctcaggaagttctccattgtacgtttttcttaattgtttaattttcaatgtttgttggtctacaatttccttattccattcatcttttatgccttttgttttaaaaccgataactagttccttgtcaaaaagaataaaatcatcagtatctttaattccaaacgtataacgacgtcctattaatgtctgataatatccttcattgtaaacatctgtattatagtatcttttgaacttttccgtggaagcgattttcgctaaatatgtatcaaactgatccggtgttggatttctaaaaaaatctggttgcattaattctttgtaagcctcggctacatcacatatttcattaactttacccgaatgactacgaaaggttagtatacgtccagtacctctatatatagaaaaccaagaacgattagttttaggatcatttccagtctggaaatctaaacaattatgtgatttaacataactgatgatccaaggaaaccgctcgtttatttgggttagcaacttttcatccattttcctatcgtaataggttgtttttattgtgtaattattaaccatttccaatttcttcatttagagtttataactatgtattattgatctctgctaagactctgcacgccattattttcctatttatatctatttatggcagcaaaaagtcgttttctaatttcttcacgcagccctattggttccataacttcgatcttttcacccatagcaagtagctgacttgttagctctggagttaagcaaagttggtattcaaagtcgctgtactctttgtgttctgtttttatctcttgttgagagaaatgcagtggcagagaacgcatatactctacatgaacaccgaatacccgaacaactactttctgtggcttcaatttgtcattgacaaatatgccaactgtatgagcataatattcttctgcatcaaaatcattggggagtataaatgagtcatctgtcaattccatttccaaaatacgatcaagggcaatattccttattccctcctgctctttgagatagccgactacataccaacgctgatggtaaaccttcatagcgtatggctgcaagtgaaatattgactgatgaccattgaaaggtttataatcaatcttcaattccttttttcgttgcattgcatctatgactgtttggagatattcagttccttcaggaatttcctcaaacaaaattcgatctttcatgttgcgccctgcttctatcatgttagacacagtgaaggagttaagcaaccactgacgagtcttgtcatttttcagttgactagaagaagaaatataatactcatagctggatgtatcacattcgacctctacaccaaaaagttctgcaatagcttctctatgcatgtggaatgtacgtaatgcaagcggtctaccatcaccgagacaactatctttccatcgacagcttatctcctcaaaagttaatctgcgatgctgaagcagcgtgttgagcaaccagatatagcggttgaaggttttacttatcattttctaaacttccgtgattttcaaaatattattactattttttattattcaattgcttaaaccctttttgtatatctcatctaattgtttttcctactttagatatcttgatagcatgttttatagggtagaattcataatcttatttagtacaaagttaacttttttgtatgcaaaaaaactgcataccacctaaatatattaatttatagcaattttttttatgtgtgcaacgtttctgcatacttcaccattatttttgcacactcattttaacattctattcgtcatggcatacaaaaaaaatccaaagaaaaaagatgctctcagtataaagagagctgtagaatctctgtgtttccaaattgattggggtttaaaactacttggcgcagagaaaggggatctatttcatcaattagcaaaagtagaggttgatttcatctcagaactcaacctcacccaagatattcttgctatcaagagcctcgtggatggagtgaaacaaaatttacagatagagcccacacccgaaagtggagacttcacccatagtgtcgttgctctcgctcttggcattgcctcaattagccaccttaacaacataagtttaccagaatcatggcgagagcaaatagagaaaaaactacttacaatctactatccggaaaagcagcgtaacaaagtcgtagattgggcaaaagcgaacggttacagcacctccagctaccttggccgtccaatcgtgaaattcaagcaattgtacttaattatagaaagaacaaaataagtccgttttttttgctctgatcatcgcattttttacaaaatacgctcattccatattaaacattccattctactaccgataaatatccattcagttacaacaaataagaatttccatgatcgtctttacagaatttatatgcaaaagaaaggggctgtctaacaaatccctaaaattagaaatcggaggtgtgtcgtaatgcacgatgcacctctttttttgttcatcactatacaaatctgttcactttctttaagctgcgatcttttgaagatttctttgatttatgtgttcccagcatctaaaaacagcagttgtaagctcataaaacagtctaatcagccagttcatacccttttttgtcagttttgcacacatcttttttatattgaaggcaatggctaggaaggcaaagtccatgaagaccttgtcctttccaaaatgtcggaaacgtttgtagttcatattgtttttaatttgtccgaacacggcttccggttctatgcatctctgccctctgtgtttcagtcctttctcagagcagagcagttctttggctctccgcttgtattgtctaagcctatgattcagttctatcgtcctgtttccttttgctttaaaacagcggcatcgcaggggacagccttcacacctgacagctctgtaccgtgcattttcgttgacatatccggatgcggttttcacattcctggtgcctatcctccgcatcctttgccccatagggcagatgcagaagtcatgttcttcattgtagtagaagttttcggccttgaacgggtccggtttgaatctcggccgctgctccatgtggaaatagttgtactttacgtaggcttccatgccgttttcggacatgaagcggtaattctcttcggagccatagccggaatcagcaaccaccgtatgggccatccggtcatacctgtttgaaaaagattgcaggaaaggaatcagggtcagtgtatccgtagggttcgggaagagtgcaaaatcggtgatgaactgattttcggtgccgatttgaaggttgtaaccgggcttcgtctgtccgttgcgcatggcatcctccttcattctcataaaagtagcgtccttgtccgtcttggaataggaattcctctcttgcagcgtttccagatggcagtcgtattcctgcagtttgtccctgtgttcttccagttccttcaactgtttgcgtttctttttcagttcagtcttttcctctttcgcggatggctcggaaacctgttccagtgcatgacgcaattctcctgccatttcagtcagcatggccggagtgaacccaacctcctcattgttctctgatgacttctcccgggcaatgacatcgtctatctgccctaacaggacatgtatcttcttcatcaggcgttcacggttccgctcaaccgtttttcgccagacgaaagtgtacttgttggctttggattcgatctttgtcccgtcaatgtattccacattcaggctgatgaagcctttggaagagagaagaactacggtttgcgtaaacacctcgttgatttccttcttcacccggttgcggaaacggttgatggtaatgaaatccggtttctcatatccggccagccagatataatggatgtcacggtgaaggagcttttcaattttccggcaggagtagatgttgttcatataggcatacagaatgaccttgagcatcatcctggggtggtaagggctgcgcccgcattccttatacagctttctgaaactttcaagattcaagccctcaaccagggcgtcaaccatgcgcaccggatcgttttctgcaatatcctcatcaattctttgaggaaaaagaacggtttggttgggattgtaaggacgaaaatgtatctttgtcatagtgaaattcttatgcctaaagatacaaaatctttaggtaataacaaagccccagcttgtgaaagtcggggctttgtgcgtaaaaaacagaaggtgtgcattttgacacaccttcgaaatcgttaaaaaaagacttgttagacagtccctaaaattctttattgagttacctataccctaactcttataagagtctacgcaaaaatatcactccgtaaaatataacctattacatctcctttatgtacattggcaccttgctgtgcacatatctccacaacccttccggtaaatccggtcagaatcttttcatattctccccacggggtagaaagataacaaaaaacttcgtcatgctgatatttacgtccgatgaatggagcaatggatggtccctctacggaaacttcccaaagtacctgcccgttatcaggagcaatgaccgggtctgccttggcgcgcttcaatttcttaatttcctcttccgaatatccgttctttgccattgccgcatccttagcatgttgcaactcttcctcaaaacgctttttggcaaccccggacttataatcacggtactggcgatcgtgcatggccagttcgaaaagctcctcgtcatcctctccatattcccagccattttcatccatttcctttcgatattcatccaaagcatccggataattcaactgcgggtcggtatcaacaaattcatatcctttagatttcgccaactctataatctccggagcgagcttacccggaagacgtccacttttacccagaatcatatcccaagtgtggttatctatcattgtccagcgatcttctccttttacctgctgcataagattcattaatgcaacattcttcacatactggctgaaaggagtcaccaaaggaggataacccagcttaggccatacatattccacttcatcaaaaagcatcacaagcaaatcatccagactaagttccggctcattcttactccttaatatcatattgataccggaatgtactcctttcaagtctgccatcatggaacccatcataccacccggcaaaccacacttcagtagaagtgaagacatgtatttattggtaggatccataaaataacccagaaaatcatcaatgaattcttgcgtcatggcacgagctttcatatatgctttcatatttatgtcgggaacctggaaacctaaatctttcaacatagcctgcacagagattacgtccggatgcactttgccccaagacatcggttccatagctacatcaatgatgtccgcaccattttcacaaacttcaagaatagaagccatagacaatcctggtccgctatgaccatgatattgaaccaatatatccggatgtttctccttgatagtcctgaccaattctcctaacatacccggacgaccgatacccgccatatccttcaagcatatttcaggtgcaccggcctcaatcagttgatcggcaattcgggcataatactcaacagtgtgtacgggagaataggtgatacaaagagttgcctgcggaatcatacctgcttccaaagcatatttaatagaaggaatgatatttcttgtttcgttcagtccacagaaaatgcgtgtgatgtccactccttgcgcatgcttgactttatacatcaatttacgtacgtctgccggaaccggatacatgcgcaacgcattcaatccgcgatcgagcatatgcgtttgaatacccgcttctttaaaaggtgcggtaaaagcacggacagccttattaggattttcgccgtacaacagattcacttgctcaaaagcaccgccattcgtttcaactctggcaaaacagcccatctcaataatcaaaggagcgatacggacaagctgatcaacccgaggttgatatttaccggaagattgccacatgtcccgataaacaagactgaatttaatttcctttttcatcatagccaataataagtgattttttcttcggttaacttcacatatacaaatataaaggtttaaactgacatatagtcaaacaatcaccttaaaaaatagatataaagagatgtttaatatcataatgcaataaaaccacctctatatagatccattcactataaataacaaatcaaattgttttatgttcgtacatatatcattcctttaagattgccaaatacttcatcaccttcattcaaggtataaacaaaccaagataaccatcaggcataatccacttgtcaaaggctttattatactcaaacttactattacaataattaatataagatgcaatattgactgaatcattaaaataaagatttcatcattttttattgttattactctagtaaataatggtattagtgagaacctaaaatcgtaaattgtaaagcacaaatacacagcaacatacaagtatatattttcctttaaaaggaacacctcgttggttttaaaggaacgatgccttggttttaaaccaacggggtgttccttttaaaccaacaaagcacttattttaagtctcatttcacgagcccttcgaatgactatgaaaacatattcaagaaggcttgcatttctctccattatttaccataaatgtgccatattttatccactagaagtacgtcgtgtccgataacagtgaaaatcagtgaaagaatttaaaagagaaacaaatacaacagaattatttggaaagaatcagttgaacgcttacatttgtcatgtgatttttttcatagtattagatttaaggttaacaaaggttggagcaaggcgttgctcctttttttatgtctatatgtgagattagttcatgtgagttaattcaataattggtacattcctcctgccaatacacgaatcacccctttcatttccagttcaaacagtagggcagtcatcttatttacgggaatatctgcttctaccacaagagaattgatttgcagatttcccagtttctccaaaatagcaactatcttctgctcttcttcagacaattcgataaaaagactacgttgcacacttaccttttccgaaagagtcatcggtatattccagcccatagcctgcacaaaatcttcggcagataataacagggatgctttattatccctaatcaaccgattgcatccttttgaatattcatcactcatgcgaccggggaaagcgaaacaatcgcgatgataaccttcagcaagttcggccgtaatcaatgaacctcccttttctgccgactcaatgacgatggtagcatcacacataccggcaacaatacggtttcgactgataaaattatggcgatcgggattcgttccggacagaaattcggtcagtaatccccctttttcaagcatgtcaacagctgttttccgatggacatgaggataaatacgatccagcccatgagctaaaacacctactgtaggtaattcattagccaaagcttcacgatgcgcatgaatatcgattccataagcaaggccgctaactacaagcacatcaggacaaagtgccttcagatcccgcagaaaagaggcgcagatttgtgtcccataatcagtagcattacgggttcctaccatattcaggatatgaagggaatttagatcagcatttcctttaaagaaaagaacgacaggagcatcttcacattcccgcaaacgggaaggataagcctcatcatgaaaggacagacaggagatccgattcttccggataaattcatattcttgttcagcgcggagcacagcttgcggacaatccaatgcctctatcacccgttgacttacttctggaatacgttccggtatttctttgcgcagacggaagacatcaacggcattacccattccatctatcaaatgttttgctcctatgtgcccgataccgggcaccattgtcagagcaatactataaatttgttcttcttcggagctgttcatttcaggtagggcgcaaagacattatcgaacaattcgctgtcacttaaacgtccgtttaccacacataccgtctcaacagtggatttcactactactttattatcattcttacggaagatatcctgataaaacacatatttgataccttcctttttcatatatagtttcgatacaaactcatctccgcttttcaatggagtcttgaatgccatactaatacgtgccactaccggatcgactccctgctcatgaagtgcagcaaaactgacacccaccgacgtcagaaactcgtgacgggtatgttccagatagtgctgataattggcattattgacaataccttgaaggtcacattcgtaatcgcgaaccttcatgtccaattcatagatatagttcatttaaattgagaattgagaattaaaagttgagaaataacagttagcctcttttttgctcaatatcgagtcctttgaacttcttcaattcttcggtcgataccagtttatacagtttgtcactgggacgtatcttatccgatttcatggagaaatgctgtccctttttcactgtttgcacagattccaagtcaacacgggcttcttccaaagtcataaatagggcaccggtagtcggccctgtaatgagaagcttatcgcctacacttacttcagcagcttctaccaggaattcggaaactccgatattggagaagtatttgatacctttacctacataaatcttacgttccgtagctgccgaaccataattcctggtccattcgcccaaacgctgtcccaagtaatatccatcccagaagccacggttgaatacggttttcaggcgttcatcccaagccgcaatcttttcatcggtgaatgttccatccaaataagccttgatagcttctttgtaacattcaaccaccgtacgtacatattcaggtccacgggcacgaccttcaatcttgaatacacgtacaccggcatccaacattttattcataaaatggatggtcttcaagtctttgggagacatgatatattcgttatcaatatccagttccacatccgtttccttatcacgaaccgtgtaagaacgacgacatacctgcatacaagcaccgcgattggccgaatgattcatctcatgtaaagagagatagcatttacccgatactgccatacaaagcgcgccgtggcagaacatttcgatacgaagttgttcgccgctcggaccacaaatatgttcttcctgtatctgacgataaatctcggccacctgttccagattcaactcacgggccaatactaccacatctgcaaattgcgcgtagaatttcaaagcctccgcattggagatattcaactgggtggaaagatgcacctcctgccctatctgacgggcataattcatcactgccacatcagctgcaattaccgcagaaattcctgcttccttggccgcatcgacaatggtatgcatcagagggatatctttatcatagataatcgtgttgaccgtcagataactcttcatcccgtgttcatcacacgtacgggctatttcccgcaaatcatcaatcgtgaatgtattagccgaacgggcacgcatattcaggttttctataccgaaatagatagaatcggcacctgcctgaatggccgcagcaagagattcgcgcgaacccacaggagccattacttcaaaatctttcaaactaagactcatagaatatattacttatttgtatcagttaagcaaatgaatgcgtacaaaggtaggcttttttccgtatttttgcagcgaaaacaagaagttacttcaatcataaacagtaaataagcagattcatatatgaaaatagcccatatagatttaggaaaacaccccatcttacttgccccgatggaggatgtaaccgatccggctttccgtctgatgtgcaagaaattcggagcagacatggtgtacaccgagtttgtatcgagtgatgcactgatacgtgctgtcagcaagactgcacagaaactaagtatcagtgacgcagaacgtcctgtcgccatccagatatacgggaaagatacagagacaatggtggaagctgccaagattgtagagcaggcacaacctgacattctggatataaacttcggatgtccggtgaaaagagtcgccggaaaaggtgcaggagcaggtatgctacaaaatatccccaagatgctggagatcacccgtgctgtcgtagatgcggtgaaaatacccgtaacagtgaagactcgtttgggatgggatgcaaacaataaagtaattgtagaattagcggaacaattgcaagattgtggcatagccgcattgactatacatggccgtacccgcgcacaaatgtataccggagaggcggattggacactgataggcgaagtgaagaataatccgagaatgcatattcccattatcggcaatggagacgtgaccagtcctcaacgctgtaaggagtgttttgaccgttatggagtagatgctgtgatgatcggtcgcgccagcttcggtcgtccatggatattcaaggaagtaaaacactatttagagacaggtgaagaattacctccacttagttttgaatggtgtatggaagtacttcgtcaggaagtggtagacagcgttaatctgctcgatgagcgtagaggtattttgcatgtacgccgtcatctggccgcaagccctctattcaagggaatccctaacttccgcaacacacgtattgcgatgttacgggcagaaacaaaagaagagcttttccggatatttgatgaaatcacttcccaacgcaaagaaaatccggaaatttaaatcagcacctattatatctattcttcaggaacttgtacttgttcctgaagaataacatgatctaattaaaacgtcaaggtctttggtttctatttaaacatcggctgcgcaaaccactttttgaacatccaggttacgactacatacaataggaatgcagagaagaaaccaacaatggcatcaatcacataatgcgcctgaatatatacggtagccccacagagcaacatatagaaaggtataagacaggcaaacaacttcttgctgccacgccaagccataatcatcagaatagtagaaatgcctacatgcgaactggggaatgccgccgtaggacgttcacccacttgctgcgagccttccaccaaactataaaaaaatccgtgctgatagcccggtccgggaagtaactcctgattatgattgaaataatcaccgatagcaggaaaaatacctttagatacattatcaataccaatggcaggaaaatagaattgagggcctgcaacaggaacgaatatataaatcagatagtaaataaagaaagaagtgacaagcacaaaagacatcttttcgaaccactcaaatttataaatgaaatagaatagagccacaatcagcatcatcggataataaaagaaatatcccatattgaatgcctcgctgactataagatgtggaaacgtatggcagaaccaaatagcaggctgaccattgaaaataaactgttcggcagttgcaaatacatgatccaaattcggaaagaaacgattgaactcgaaagtatccggataccagtaagacagcagactcatctgaatgacaatacgcacaaacgccgaaaatttacagggagcaagacgataaagatacatcaataaaaaagtcatagccgcgatcatagccctatccagcaacatgtgccatggatgatccatccgctgaaacaggaacagaatcaatatggaagtcaacagattataaatcaatgtaatcttttccacagcaaacaaccctttccgggtttctacgcgcttaaataagtctaaagccatccttcatttttataccaggcaatggtttcccgaactcccttttccaaatcatattcgggcacataccccagttcatccattaccggggttatatcgcattgccagttgcgttgtttcattatcttatatttatccgaattcagggtactgctcctcccggaacgtgtagcaatgaattcagcgaacaaagatataacttttagcacaattaatggacatttcaagtgaagaacaaacggattacccaattctttttgtatcagatccgaaaaggcacggcttttataaactttcccgtctgtcaaaaaatacgccttacgaactacttttttctctattcccaggaaaatagcctgcacaatgtcttttacatacacaaaggtcaagtcctgacgacggaaacctaccgagaaatcaacgtgtttccggatagactttgccatcagatagtaatcagcttcacgaggtccatagactcctgtaggacgataaatgacataagggaaaccgggcatactctgaatatacaactccgctttcagtttgctcaatccataagcagtattgggtaccgcagggtcgtccgcttttatcggagtatagtccttctcacgtacaggtccgaacacactcaatgtactgatatagataaactgtttcggaaccatattcagctccttcaacgtatcgataaaatatttggtctgaagataatttacatagtcaaaagagtgcttgtcggggcactttgtaacaccggcacaatgaatgatataatcaaatttgttgtaagtgcctttatgcccggagagttgggcacgaagttcattagggtgcgcaaaatccagttccagaaagtggattttccggtttttcaaataccgcttgctactcgtagaacgaatcccggcccacacaccaaactttcgcttcaacgcttcctccacgatgaaactgccgataaaaccactcgcgcctgtaattaaaatactctccattattacttttcaggtcctacatgaatattaattgaaaaaatatgatgccacaaagatacgataaatataaaataaaagccattttgcttttctcaattattatttgtttatttgcaacgcgatttatttactattcaacacttttaaagcacgtggaagataaggccgattttgattttctttttaaagagtactatcctcaactttattattatgcatttcacctgattaataatatggaggctagcaaggatatcgtaagcgacgccttcgaatttatttgggccaattatgcaaaaatagataaagccacggctaaatcttatctatacatttacgttcgcaacaaaagcattgacttcctgcgacatcagaatatacatgaacagtatgtacaaatctattccgaactgaccaaaagttatgttgaaacggaatatctggagcaggatgaaagaatgatgcatatcagcaaggcaatggaaaaactgactccacataccaggcatattttagaagaatgttatattcaacgcaagaaatatcaggaagtggcagaagaattaaatatcagtgtcagtgcagtcaggaagcatattgtgaaagcattacaggtgatacgtgaagaatgtgcaaaaaaatcataaatcaggtatctttattttatgattaaacgtaatataaataagtatgatacagtcaaacagtgatgaataaagatattgacaatataaataatacagatgaatctgtagagaaggcgctcgacatcatggagagttcttcagagataaacgacgaacagctgcaggagatgcttaaagataaagaagtcctgcaagcttgtcgcgacatcatggatagtagtcttttcctacaacaaaaaggaggaatagagcttcctaatgtagaaatggaattggagcgatttaagaaaaaacaacattcaacacgaatgcgttccaatctctggaagataactatcggaatagccgccatgattaccgttctattcgggagttactatttaattaatagcctgacaacccctgcactcgaaccaatcactgtattcactgctgatactactccccaacatattgttttgcaaaaagatgacggagaaaaagttgtgttagacgaaccgcagtcaaacaatcaagtcctgcctaaaaccgccattgcaaagtctgaaaagaaagagctggattataggcaagtcatctcaacaactacacagacacatgtacttaccgtaccacgaggtgaaagtttcaaagtggtattatgtgacggcacagaagtctggctgaatgctaatagtaattttgtttaccctacagcctttattggcaacgagcgtatcgttactttagaaggcgaagcttatttcaaggtggccaaagacgccaagcatccctttattgtaaaaaccaagtcagtccaaacccgcgttctcggcacggaattcaatatacgtagctatactcccgaagatactcatgtagtacttattaacgggaaagtagaagtaagtaacacaaaaggaggatcatatacccgactatatccgggagaagacgcccacctgcaatctgatggaaatttcgttctaacagaagtagacttagactcttacgtctattggaaggacggctatttctattttgacaatattacattgaaagatattatgcaaaacttaggacgctggtacaatgtaaacatagaattcagaaacaaagaagcaatgacgtataaaatgcacttcatatccgatcgcactaaagatttagagcatacaatctcattgcttaatagaatgaaaaaagtcactgtcaccttgcaaggcaatacgcttaccatagactaggtttttattgcataagtataacaaatctatgcaataaacaacaaaatatcacttttattaaaaaataaatcgcaaaaggggtatccattttcttttctcatacgcattagttatataaacatatccaaatagtgttattaaaaacaaacgtatgagaaataattggaacttatttattgtgtgttttctatgcgtattgtgcttccagccttaccaagttaatgctcaaacgcaatcacaaaagaaaatcacgattgagattagcaacgaacgattgccgtccgtacttaaacgtctggaaaaactctccggctacaaaatcctatttacgtatgacgatgtcaagaaattcaccgtttccggctctgtcaaagataagagtatagagcagactctcgatattatcttagccaataagccactagaataccatattgaagatcaatttatcacaattacttccaaaggtccttccaaacaagcgaaagtattcaatgtaaaaggagtggtaatttccggtgatgacggacagcctctcatcggtgcaactgttgtcatcaagggaagcaagtccggtgtattaacagacatagacggaaagttttcgatagaaaatgtatccaataaatccctgttacaattttcttatataggaatgaagccacaagatctgactcctaccccaactatgaatgttacattaatgcctgatgtacaaactttatcagaagtagtagtaacaggtatgcaaaaaatggataaacgcctgtttacaggagcaaccaaacaattgtccgcagatgaagtgaaactagatggtttgcctgatatcagccgtggacttgaaggacgcgccgcaggcgtatctgtacaaaatgtttccggcacgtttggtactgccccgaaaattcgggtacgcggtgccacatctattttcggtagttcaaagccattatgggtagtagatggagtcatcatggaggatgctattgacgtaggtccggatgacttatcttcaggagatgcagagacgctaatcagttcagccattgccgggttgaattcagatgatatcgagagctttcaaatattgaaagacggatcagcaacctctatctatggcgcacgagccatggcaggggttattgtagtaacaaccaagaagggaaaagccggcgttagcaaaatgagctataccggtgaatttacaacccgtatgattcccagttataaagaattcaacattatgaattcgcaggaacaaatgggaatctacaaagagatggagcagaaaggatggcttaataacagcgatacttaccgtgccaaagatagtggtgtatatggacgtatgtatcaattaatcaatcaatataacccggttacaggacaattcggacttgccaacacgccggaagcacgtaatgcttacctgcgcgaagcggaaatgagaaataccgactggttcaataccttattttccaacaacgttacacaaaaccattcggtcagcatcacttccggaactgaaaagtcttcattctatgcttcattaagtgcgatgtcagatccgggatggtataaacaaagcgaagtaaaacgttatactgctaatttaaatacaacatataatatatataagaatttatctataaacctgatctccagtgcttcctaccgtaaacagaaagcccccgggacactaagttcagaggttaatgcagcaagtggagaagttacccgtcagtttgacatcaatccctattcgtatgcactaaatacatcacgtgcattagatccaacagttgactatacagccaactatgcaccgttcaatatcctccatgaattggataacaattatatggatttgaatgtagctgatgttaagtttcaaggagaaataaaatggaaagcacttccggagttagaactaagtgcattaggagcagtcagatatcaggcttcttcacaagaacacaatatcaaagatcactcgaatcaggcaaccgcttatcgcacaggaatggacgacgctaccattcgtgacgaaaacaacttattgtataccaatccggataatccgtatgctttgcctatcagtatactaccggaaggaggtatttaccagcgtaaggactatcgtatgttgggggtagacttccgtgccacagcatcctggaatcatttatttgcagaaaagcatataaccaatcttttcgccggtatggaagtaaatgatttgaaacgtatgcaaaattattttcaaggatggggaatgcaatatacaatgggtgaaataccatcgtatgtatatgaattcttcaagaagggcattgaatccggtgaaagctattatggattaaaccatacaacaacaagaagtgtagcaggctttgccaacgcaacttattcttatgatggacgttatacagtaaacggaacattccgctatgaaggcaccaatcgcatgggaaaaagccgttcttcccgctggcttcctacatggaatatgtcaggagcatggaatgtacatgaagaaaatttcttcaagacattcagctctgtactgtcacacttaacattcaaagcatcctactctttaacagccgatagaggaccggaatatgtgaccaactcacatgccataatcactagttattcaccatttcgtcctttcaccagcggacaggaaacaggactttatgtatctgatcctgaaaacagtgaattaacctacgaaaaaaagcatgagttgaacctcggtgccgacatgggattcttagacaaccggatcaatttttcgatcgactggtataaacgcaacaactatgacctgattggtattaccccgacacaaggagtaggcggttctatctacaaatatgccaatatagcttccatgaaatcacatggtatcgagttcaccatctcaagtaagaatatccagtcgaaagacttttcatggcatacagacttcatcttttccaaagcaaaaaatgaagttacagaactgaatgcccgttccagcgtaatggatttagtttcaggttacggttttgcccgtcagggttacccggtacgtggtttgttttccattccatttgtcggcctaaattcaaatggtatcccgatgtataatatcaatggaaaaataaccagtaccgatattgattttcagacacgtgacaacatagactacctaaaatatgaaggtcctactgatcctaccataacaggaagtcttggtaatattttcacttataaagcattcaaactgaatgtattcatcacctattcatttggtaatgtagtacgtttgaatccatgtttcagctatcaatacagtgacttatcttctatgccacgcgaattcaagaatcgctggacagtgccaggtgatgaaaaacgcacgaatatccccgctattatctcgaaacgccaatatgaagataataaagatttaatgtatgcatataatgcctacaattattctacagaacgaattgccaagggagactttatccgtatgaaggaaatatccttgtcctatgacttcccccaatcatggattgcaccagcaaagatatctaatttatctttgaaacttcaggctaccaatttattcctgatttatgcagataaaaaactcaacggacaggacccggaattcttcaataccggtggagtagcttcccctgtacctcgtcagtttacattgactcttagattaggattttaaccactcagataattataaaaatgatgaaatacagaaacgtcttatatacaacactcatttcagctctatgcttgggaacaacttcctgtagtgactttttagatgaaatgccggataaccgaaccgaattgactactgaagaaagtattactaaagttctggtatctgcatatcctatgactaccaactgccacataggagaattttacagtgacaatatcgatgaaaatagcagagcatacagctaccttttccgattaaacgaacatttgtaccgttggcaacaaacgactgaagaaaatcaggactctcctcatgctttatggaatgactgttataactccattgcatcagccaaccaagccttggcggctattgagcagatgggaaatcctcaatcattatcagcccaaaaaggcgaagctttgatatgccgtgcatacaatcattttgtattagctaccacattctgcaaagcgtatggtacaaatggggacaaagacttgggtataccttacataaaagaaccggaaacatctgtaaatccacaatactcacgcggaacagttgctgaagtatacaaaaatattgcagccgatttagaagaagggctacctttaattgatgacaatatttacttacgggtaaaatatcattttaataagaaggctgcttatgcatttgcagcccgcttttatctatattatacacaaccggatttttccaactgtcagaaagttatcaattatgccaatatagtactcggtaataatgcgtcccaatatttacgtgactgggctgcattaggagctttatctcccaacaagaatatacagccgaacgcttatgttgatgcagataaccgtgccaatctaatggtaatatcagcagcttcatattggccattggtttccgatccgggttatgccaactgcgaaagatattgcatgaacaatattactgcttcggaaagttgtaaatccgaaggtccatggggagatcagtcaagttatcatcagatcccattttcacccggtggctctataaagaacggattccgccgcttagttatctatcagcaattcacgtcgggcaacagttggatcggctacatgctgtatcctgcttttaccaccgacgaagcattgctttgccgggctgaagcctacacgttactaaaacgttatgacgaagctgccgccgatatagatgcctggcagaaagcctttacaaaaaacacccaaactttgaccaaggagacaatcaatgatttttatgcccgactaaaatattacacaccggaagctccgacagtaaaaaaggaattgcatccggattttgtagtagaaaaaggaatgcaggagaatctaatacattgtattctacatgcaagacgtctgctaaccttagaagaggggcttagatggcaagatataaaacgctatggtattataatctaccgccgctattatgaaggttataccttggtgaatatcaccgacaagatggacacgaatgaccccagacgtgcaattcagctaccggccagtgtcattacagcaggtatgcaaccaaatccaagaaatgactaaataactttaggaggaaaaaaatatgaagaaatacatcatatacagtttaatcatgacattgacctgtggactgggtgcttgcaacaatgacgaagacgtagacaaagcaaacagcattttctccacagaagaagtagatcgtaacccattcgacaagtggatattaggcaattatacccatccatacaacattgcattaaaatatcgcatggaagataacgagagcgacatgacacacatattagcacctgccgaatacaaaaagtctgtggtactggctaaaattatcaaacatgtgtggctggaagcatacgatgaagcaacaggcaatccgaacttcttacgccaatatattcctaagacaatccactttatcggttcccccgcctatgaagacaatggaactatggtattaggaacagctgaaggcggcatgaaaattacattatacaatgtaaatgacatcaatcccgaccaaatagatattaacctgttaaacgactactatttccagacaatgcaccatgagttcgcacatattctgcatcaaactaaaaactacgatccggcctttgaccgtattacggaaaatgcctacatcggtagcgactggtatatggtgggagccgaccgcaatgcatggcaacaaggatttgtcactccttatgcaatgagtgaatcacgtgaagattttgtggagaacatcgcagtgtatgtcacaaataccaaagactactggaataacatgctgcaaaatgccggtgaaaacggccgtacactcataaagcagaaattcgaaatagtctatagttatatggaacaaacctggggaatcaatctggacgaattacgcgagattgttctacgacgccaggatgacatagcaaacggctatgtagacttaagtattattgaataaaatatgaaaattatgaagaaatatctatccatatacacacttctggcattggcctgcattgttttgcaatcttgtcttttctccgaagaagaaatattcgacgaatcatctgccaatagagccacagccgatgtaatcaaatgccaggagattcttaaagatgtgccgaacggctggaaactggaatattacataggaagcaactattctgcaggtgcagtcactttactaatgaaatttgacgggaagcaggtagaaatggcttcggaaacaggcgcagaaagctataaaccgggaactataataacctctctgtatcaagtaaaatcggaacaaagcacaatgctcactttcgactcatacaacccactgatccatatgttttcaggtcctttaggcctgaacatgaacctaggaggggattacgagtttattataatgagcgcaactcccgacaaagtaattctgcaaggaaaaaaatacaaaaacataatggagatgacgcctatgcccaaagatataccatggcgtattcagattgaagatatcattaacattgagaaagatgcttttctaaatacataccgcatggagaaagacggacaagtactgaattactttatacgcaacaatggcacaatggctacattctccgcttacagcgccgattatagtagtgcaagaagtttaccctatatctacacagaaaaaggattaaagttacaatccccgtacaatgtcaacggacttgaagtccaaaacttcaaatgggatagaaagtccagactatttgtttgtaccgacgcaggagcaactgacatcgtacttaaagaatattatcccgaaaactatctacaatatgaagactatatcggtacctacactgcaacgattgacgattatgacgaagggccaacttcgcaatctgtaaccatctctcctaaagtcagaggagaaagttatacactgaaaagtattggcggattcaacttcaccctccagtatgacaaagccagcggaaaactagttttagattcacaaagtataagttcgacttcttcatcgtcttattactttgcgtgcgcggcaggtgtggaaggctatgcccacacagaattaagtctgccatcacgcctacgcaacggattgataaatgtgacgacaaacagcaaccctttcactttttactttgcggataaagcaagccaggaaattacatcattgataatctgggcttattcatctgatgaatattcaacctccggactaatgggttactggagctggtataactcaatcttaatggtaaaagaaaacgaaagtaattaatacgattatgagaaagctttttaatatattcttatttgtactttgcatcgtagcaatagcgggatgcaatgatacggaaagtagcgaatccaagttagaaatcaaagctgtaaatactaatttccaagctaccggcggaaaaggatacatacaacttcagtcaacaggaaatataacagcagatgttgacgtcgattggtgtgtgctgaaagaagtaaatcctaatgaagtggtattcgaagtaaaagaaaataccgggtactccggtagaaatgctttattgacaatcagtaacggagtaaagacagaagcattcaacatcaatcaatccggagctgttttcatcttcggcaaagacgaatggatgctccgtaccgacaataaagcaactactctgccaataaaactacaaagttctttcgattatacaatagacatacccgcagaagctcaagaatggttgtcatttgaacagaatgcgaagggaataaatttcaaggtaaaagaaaatacctccggaaaaatgagaggagctattgtcaatgtggcagcaaaagacagatcggcttcttatcaggtaatacaatatgatgttgacgaacttaccggaacatggcaaggcatgttttcagacgggcaaatgaattacggtttgaaagatgtcaccattgagaaacaggaagacggaacatacctgctttcaaacattctaaccggattgccttacaaactgaaagcaaaagccatagacaattgcctggcttttggggccggtcaaaacctaggagtcttcgaggacaatttatatctctcattcgaaattcttagctctgacctatattatgtaaaagatccttctgtaacaatctcattaggccccgtaatgttaacagacggaacattcgttttcgctttttccggaataaaagaaagtgatcctttcggttttgttttccgggtatatgaagatgcaaaactacagaaagttatagacaatctgtccatttttattaattgtattctatttaaagaagacataatccaataacatatgaaaaagatactattaactagctttatcgtggcattaggattacttggtgcaagctgtaaagatgacaacagcaccgcaggcggaggaggagaaatacttccggaccaacaggtaagctgtgagatatttatgccgactaacggagaaaccgttataatatcagacaaactgattatcagaggagaaggaacgactaactatggtaaaattatctccgctgaacttaaagtaggaggagaagttattaccgacataagttcggttccattctactatgaatacactttccccaaggaagctgaaccaggagagttgaaaattgaattagcagtcaaaggagatcatgaaggcagtgctttggcaactattactgtcacaacagaactcggtgacagacctgcaccacctcaatatggagaagacctcacagatacacgtgatggaaatgtatacaagacggtacaacttgcagaccagttatggatggcagaaaatttacgctatttaccggaacagaattttgatatatcttcaacagcgcccaaatattatgtcatgttcgacagtgatatcaaaacagacttgggaaaagcttatttaaaagcttatggagcctactataacttacctgcagcacttcaaggtgaaacagcattaggagaagatgaaacacgaaatataaaaggtgtttgtcctgacggatggcatattccgtcgcaaaaagaatggcagacattatctaaatatgttttagactccggcatggccgctatcatgagtgatggtcaagtagacgaaacagccatagcaaaagctttagcttcaacaacaatgtggatgctgccagaatatacagaaatagaacctcaaccaacttgggttggcgtagaaatggaaaagaataatgcaaccttgttcaacggtttacccatcggattccgtgcatgtgcaggtgacgaagattggatgcatacctgctacagtgccggctggtggagttcgacagccggagtacaaatgggacctgaattcggtatcaccgtacgtttatggtcagacctccacacatttgtaaccaatgcagaattcaatccgggagtaggtcttcctgtccgttgtatcaaagactaacgattatattattactcactaaatataaatacatttatgaaaaaatttggattctttttattcgcagtcttaggactaattgcttgtggtgacgacaacaacgaccctactcccgagcaacatgtaacatgctccatatctgcacctgctgaaggagctacggtaaacattgcagaaaaaatgacaatcaaaggagaagcaacgattgactttggtgaaatctcaaacgtcacattaaaagtaggagacaaagctatatcagaagttactgctgtgccttttagctatgattatacatttgaagctaaccaagccgaaggagcattaaaaattgaattaaccgtcaaaggtgatcaaggcactacggcaacaagtgaagttaatgtcacattacaaaaaacaaaaccaactcctgaaccggaagaaggaaaaatgattgacccacgagacaatcatgaatacaaaattgttacgattggtgaacaaatatggatggcagagaacttggcctatttaccatcagttagcaaaccggaagctgccgctactagtgatggagatccactctattttgttttcaactatgatggcgaagatgtaaatgcagctaaagccacgaaagaatataaaacatacggagtcttgtataattggtatgccgctatgaaccaaaagaatgcaacaggtggagatgcagaagccataccaagtggtatccaaggaatctgtcctagcggatggcacctgccaagtaaagcagaatggaaaaagctagaaagttttgttgttagtgaattagcaccagttgaaggtaacgtatggacagatgaggatggaaataagtactctgataaagattgtaaaaacgtctggtcagcattaacaggaaaacttgatactgacggttggggagaatctggcatgatagatgaaaatcctgaccttgctaatggcccgcgtgatacctatggctttaatgttatacctgctggacaatgctatcatagtggaggttttgaaacacctaagtcaaagagtagaacagatttttggagtacagaccaagctacttatggagcaggaactgtatatttcagtaatatgagttatggattaggttattcttctgataaaggaggaatacaagaaaaacgcggtctttcggtacgttgcgtaaaaaattagttataaacaagtattcatcaattagttcattacagaattaataaattctctcttaaagataagggaagcgtgtcaagagatatacttccctttttatgtgcctctctacacaggaaatagtgaaaatgcaatatgtaattatgaccataacgaaggtattctaattttattctctctctctttataaacccgaccagcctccttttccgaattgattcagaaaaggaggctttctgtttcaaaatctatgaaatatcaagtaacacaaaaagttttgtcctcattcagaactatcaagtccaaaaatttgtttactttgtagattgaactactaataaattccatataatatggcaaaaaagaaagaaaagaaagagaaaaaggccggcaaaagaatgagtaagaaagagctggcagcattattaatagactttttccatgccaaatccagcgagaccttgagtatgaaatatatattttcagaactgcgtctcaccacccatccgcagaaaatgctatgcgtcgatatattacatgaccttttagctgacgattatatttccgaaatagaaaaaggaaaattccgtctcaacaatcatggaacggagatgacaggcactttccaacggaaaagcaatggtaagaattcatttattcctgaaggaggaggcgaaccgatatttgtggccgaacgcaattcggcacatgccatgaacaatgacaaagtaaaaattgctttttatgccaaacggaagaacagagaagcagaaggagaagtaatagaaatactggaacgtgcaaacgatactttcgtcggcacactggaagtagccaagtcatacgcattcctggtgacagagaaccgtacacttgccaatgatattttcattccgaaagataagctgaaaggcggtaaaaccggagataaagccattgtgaaagtaaccgaatggccggacaaggctaagaatcctatcggacaaataatagatatattaggtcaggctggtgacaataccacagagatgcacgctattcttgcggaattcggtctgccgtatgtatatccgaaagcagtagaaacagcagcagacaagattcctgccgagatttcagcagaagagattgccaaacgcgaagatttccgtaaggtaacaactttcaccatcgacccgaaagatgccaaagactttgacgacgcactttccatccgcaaactgaaagacggattatgggaagtgggtgtacacattgccgacgtgacacattacgtaaaagaaggaggaatcatcgacaaggaagcagaaaaacgagcaacctccgtttacctggtagaccgtaccattccgatgcttcccgaacggctgtgtaacttcatttgttcactccgcccgaacgaagaaaaactagctttctccgttatcttcgatattacggaaaaaggagaaattaaagactcacgcatcgtacatacggttatcaactccgaccgtcgcttcacctatgaagaggcacaacaaatcatagaaacaaaagaaggagacttcaaagaagaagtgctcacattagataccattgccaaagcactgcgcgaaaaacgtttctctgcaggagccatcaacttcgaccgctacgaagtgaagttcgagattgacgaaaaaggaaaaccaatcagcgtttacttcaaggagtcaaaagatgccaataaactggtggaagaattcatgttgctcgctaacagaacagtggcagagtttgtaggtaaagtgcccaaaaataaaaagcccaaagtgcttccctaccgtattcacgacctgcccgatccggagaagttggagaacttgtcacagttcattgcccgcttcggctacaaagtgcgcacaagcggaacgaagacggatatctccaaatccatcaaccacttattggatgacattcatggaaagaaagaagagaacctgattgaaacggtatctatccgcgccatgcaaaaagcacgttattcaactcataacatcggccactacggactggccttcgaatattacactcactttacttctcccatccgccgtttcccggacatgatggtacatcgtttggtgacaaaatatatggacggagggcgcagcgtatccgaagccaagtacgaggacctctgcgaccacagctccaacatggaacaaatcgcagccaatgccgagcgtgcttccatcaaatataaacaggtggaatttatgagcgaacgtctgggacagatttacgacggtgtaatctccggcgtaaccgagtggggactttatgtagaactgaacgaaaacaaatgtgaaggtctggttcctgttcgtgacttggatgatgactattacgaattcgacgagaagaactattgtcttcgcggacgccgcaaaaacaaaatatacagtttgggagacgctattactgttcgggtagcccgtgccaatttggagaagaaacaattggacttcgaattaatagaaaagtaaaagtttgaatattcaagcaaactgaaaagctcattcaacccctgataacattagtacgggaatacgattgattagataaatctgtgaaaacaacgagaaaaaagtttgcatagatttgtgtaatcagtcgtaagtctgtactttagcgtatcattttgattattcttactattataacattcatatatccatgaagactgtcattatcgaagacaaacaacgaatcgagtccattatcctgcattgcgatgcctgttttgtgggcattacagatttagaaggtaatccctatgtagttcccatgaacttcggttatgaaaatggcaccatatatctgcattcaggtcccgaaggcagcaagttagagatgttggaacataataataatgtatgtatcactttcagcctcggacataaacttgtctaccaacacgaaaaggtagcctgcagttacagtatgcgttccgaaagcgcgatgtgtcgggggcaagtggaattcatcgaagagatagacgataaacgccgtgcactggatatcatcatgcgacattatacagacaacgcattcagctattccgatcctgccgtacgtaacgtaaaagtgtggaaagtagccgtccggcagatgacaggaaaagtcttcggtctgcgagccaacgaaaagccataaaacagtttccggctttcggctaatgaatttaacttcatgctccacacccgtttaagaaacgaattcagcattcaagaaacatgacggagcatctccaagcaaatttctccaaacaaaagttcagggcacttttaccctcacaccctcaccctctgcctgtatctctttatccatcggcatcacaggtgtgagggtaaaggtgatggtaagtgagggtaggctgttaccctcaccctgtctcattgtaagcgtcgtcctgcttccccgcattacataagaaatgcaaccggtatacatctgttatcccttcattatccatccgttaaaccaccgatatagttaattccccacggccgcggggagatcttcccacagccgtggtaacttctcgtcacagccgtggagagaattcgtcacggccgtggtaaactaaccatatcggtagtctgatgcaagaagagcggtaacttaatacaataataaaggggagataaggtattcttccctgcttcataatatccattctccctatacaccagtaccaaggcagccgtttataacatgattataaagactattctatcctctcatttcaaattctttttgtatacttgcagcataaatagataagtactcttacaaataaataaattatgaagaaattactatgtctcgccctgttaatatctgccggaagtatctacaccggcaatatctcggcaagcaacaaacctaccggtaacaaatccggcaacaactcaaaagacatatacaaaaagacctggatcgacttcaataagaacggtgtaaaggacgtatacgaagatccctccgctcctatcgaggcccgtatcgcagatttgctttcgcaaatgacgctggaagagaaaacctgtcagatggctactctctacggttcgggacgggtattgaaagatacatggcctactgccgcatggtcagaagaaatctggaaggacggtatcggaaacattgatgagcaggcgaacggactgggtaaattcggttctgaaatctcctatccgtatgccaacagtgtaaagaaccgacacaccattcaacgctggtttgtagaacagacacgactgggcattccggtggacttcaccaatgaaggaatacgcggattatgtcacgaccgggctaccatgtttcccgctcaatgcgggcaaggtgccacgtggaacaagaaactgatccgggaaattgcgaaagtcactgcaaatgaggcaaaagcattgggatataccaatatttattctcctattctggatattgcacaagatcctcgctggggacgtgtggtagaaagttacggagaagatccgtatctggcgggcgaattgggaaaacagatgatcctcggtctgcaaagcgaaggtattgttgctactcccaagcatttcgccgtgtatagcatcccggtcggtggacgcgacggaggtacgcgtactgatccgcacgtggccccgcgtgagatgaagactctttatttggaacctttccgcaaaggtattcaggaagcgggtgctctaggagtgatgagttcgtataatgattatgacggggagccagtttccggaagttatcatttcctcacggagattctgcgtcagcaatggggattcaaaggatatgtagtatcggatagtgaggcggtagagtttctgcacaccaaacatcgtatcaccccgactgaagaagagatggcggcacaagtggtcaatgcaggattgaatatccgtaccaactttactccgccacaagatttcatcctcccgttgcgtcgtgctatcgacgaaggtaaagtctctttgcatacgctcgatcaacgcgtcagtgagattctgcgtgtcaagtttatgatggggctttttgataatccgtatcccggtgatgagcgtcgtccggagacagtcgtacacaatgacgctcataaagcagtatctatggaagccgctttggagtccgtcgttcttttgaagaatgagaatcagatgcttccgttatccaagaacttcaaaaaaatagctgtgattggtccgaatgcggaagaagtgaaggagctgacttgcagatatggtcctgccaatgcgtctattaagactgtatatcagggaatcaaagaatatctgcctaactcggaagttcgctatgctaaaggctgtgatattattgataaatatttcccggagagcgaactgtacaatgttccattagatacacaagagcaggcgatgattcaggaagcggtagaattagcaaaggcttcggatgtcgctatccttgtactgggtggaaatgagaaaacggttcgggaagagttttcacgtaccaatcttgacctctgcggacggcagcaacaattattggaagcagtttatgcaacaggtaaacctgtcgttctagtgatggtggacggaagggcagcaaccatcaactgggcaaacaaatacattcctgccattattcatgcctggttccccggagaatttatgggggatgccatcgctaaagtacttttcggagactataatccgggaggacgtctggctgtcactttcccgaaatctgtgggacagattccttttgcattcccattcaagccgggttctgactctaaagggaaagttcgtgtagacggtgtactttatcctttcggatatggtttaagctatacgaccttcggatattcagacttgaaaatatctaaaccggtgatcggtccgcaggaaaatatcactctttcatgtactgtgaagaatacaggaaagaaagcaggggatgaagtagtccagctttatatccgggatgatttcagcagcgttaccacctacgataaagtattgcgtggttttgaacgtattcatttgcaaccgggtgaagaacaaaccgtcagctttacccttactcctcaagacttgggattatgggacaagaataatcagtttacggtagagccgggaagtttctcggttatggtgggagcttcttcacaggatatacggttgaaagggagttttgaagtgcaataaataaatccaagacagtcactaaaagcaatgtgaggcagcctcttactatttaggccacctcacattctttttatttctctttcgtcaactaggatagagttataagttatgcttaataaaactgacatatctgttttgtatatcaactataactataaaaagatgaaacttatcaatagccctatttatacagagcgtattcggcggttcactgtaaaaagggaaggatgtcagctaaagacattgcgcagttcaccaatctcactattcgtggggtagaaacagcccgttaccgaataagaaagaaacttgccattcccggaaatattaatcttgttgattttctaattgactttacataggaacatttactgaatattccttctaatttcacacccctattctgttgggattttctaaagaaactttatctttgtaatgtcaacaattaaaagaatatggttcgttttaatcttgttatcaccttactactaatgataaatatggctgtcaaagccgaactgaccaaccggatgttcgatgtcaggcatgtaggctatgcagaaggccttagtagtcaacgtgttttttcgattgtcgaggatggagacggtgcgatgtggattgctacaaaaaccggaatagacagatacaacggtcatacggtaaagaactatgatttaccgggcagtttctattatggcgatcttgccggacgcaggctttacttattgtacgatgcacaacaaggactgtttgcctacgaccacaccggacgaatctaccgatattccaccatcctggatcattttgaacaagtcctccacctgggacaattgattcaggaagaagtcatcttgaacaaactctgtttggatagtgacggaacctggtggatgggggcggataaaggactatacaagcaagaagcggaccatcgtatagttgccgtgctgaaaggacaatatgtcaacgacatcgcatttgccggcgagtcgctttttgtgggtacttctaacggagtctggcaactgtcacacgccctgccggataagaaacgccagctgctggaagggtggaatgtacaaacattgttctgcgacaaaccgaaaaaagaactctggataggcacatttggcagcggtttgtctgtgatgaacctcgacacttccaaagtgcttgcgctggagggacaagggagcacgttccttcatccgatacgagcaattacagactatgatgtacataccatactcataggcgtggacggtggcggtgtgtatgcgatagacaaggacaccaagaaagcccgtttactgatgaacaccaaagatgacacagatacttacctgcgcggaaacggcgtatatgccgtaaccagagacgaccagggcaacatctggataggtagttatacgggaggtgtatccgtggctatcctgctgaaacatcccatttcgatattaatacacgaaaagggaaatacccattctctcatcagcaacaacgtaaatgatatcgaagaaaacccggatggcaaccaatggttcgctaccgatgatggaatcagcatccgaaacaccctgtcaggcacttggaaacacgtgctgaaagaaatcgtaaccatttctctttgcacatccggaaatgggaacgtatgggtaggaacatacggagacggagtgtatctactggataacaacggacgcgtgttacgccatctcaccaagcaacaagggcaattgaccaccaattatattttctccgtcagacaagacatggagggagacttatggataggaggtctggacggatgcctgatcatgtttgaaaaagaaaaaggcagcaaacggtctttcgacgtgaattgggtacagtccattgaacctatcgaccgaaaccgggtagcggtggctaccgtcaacggtttcttcctggtggacaaacatacagggaatatacagcactatgccaattcccaggaatttcacaatcagaatgtcagtgcttatatcatctctatgctattcaatgacgacgaaaccgtgtggctgggaaccgaagggggaggattgaatctatatgacatgaaaaaccggacggtaaagactttcactgttcaagagggattgccgtccaatgatatatatagtttgcagcaagacgacaagaaacgcttgtgggtcagcaccggaaaaggaattgccttgatagacagcctgcgcgtgtcgaacctcaactatgcaggcaatatagacaaggaatataacaaatcctcatttgcccggttgatgaacggcgagtttgtgtatggcagcacggatggcgctgtctttatcatgccactcgacatctcaaccgtagactactggacgctcctgcgtttcacggggctgacggttgattatcaaaacgtccaggaagaagaatcgttgagacccgccatccatgatatgcttgccgaccgtgcggtacggctcggctataaatacaactcgtttaccgtttcttttgaatctatcaactatcgtttccagcgcgatattgtctatcagcatattttagaggggtatgacaatgactggagcaaaccgtctgccgagggaaaggcatcctacaccaaggtatcgccgggcacttatctttttaaagtgcgcagcctgcggcgcagcgacggaaagactatctccgaaagcaccttagaagtgaaagtgagccaaccatggtggaactcgtggtgggcttgggctatttacctatttataataggcttcgttttctatttcatcctgcgctataagagcaaccagctccaaaagaaatacgacgaagacaaaatacgtttcttcatcgacacggcacacgacattcgcacgccggtgacgcttatcatggcacctctggaggatttgaaccgggaacaggatctctcggacaaagcccgttattacctgaatctggcccatgaaagtacccagaaacttcattcgctcatcacacagttgctcgaatttgaaaaggtagacgcccacaagccatcctcttcatcggttccgctttgtctgaatgaagttttgctgaaagaagtctccgtcttccggtctttttgcgagaagaagcagttgacactgaatctgacccaacccaacgaatccgttttcgtttcggcagacaaacacctgatagagatgttactcgacaatcttctttccaatgcctgcaaatacaccatgccccagggagaaatcagtctggatttgaaagccacgaaacgcaaagccatcctttcgttgaaagataacggaataggcataccgaagaaagcgaagaagcacatcttctccgatatttacagagccgaaaatgcccggcagtcacaggaagaaggaaccggattcggactgttgcaggtgcagcgcattgtaaagatgctgcatggaaaaatcactttctgttccgaggagggcaagggaactactttcatcgtaacattgccgcgaaccaccaccgtagccgaacccgtgtcgcacgaatcatccttcgaacaccttgccggcacatcggataataacagccacgaaacggataaaataaaagatccggacgaccggaatacattgctcattgtagaagaccacgaaactctccgtcactacctccgccagacctttgaacacctctatcgggtgattgatgttgccgacggacacgaagctatcgcctgtctcgccaatgaatatccggatatcatcctctccgacgttatgatgcccggcatacggggtgacgagctttgcagaatggtcaaggaaaatcctgacacatcgggtattcccgtcgttctgctgacggcaaaggctaaccacgaagcaatagtggaaggattgaagaaaggcgcggatgattatatccccaaaccattcagtacagagattctgaaattgaaagtacaaggattgattgacaatcgaaacaggcagcggcagtttttcatgcggcaagccatcgctcaagtagaggcgggcggcaaacgtgacgacaatgaaagcaatgaaaacaatgaaagtatcgacaacaaaaatgtaacgacagcaagcgaaacaatggccgagggcgaccgccggtttatcatgcaagctacccggtttgttcttgaacatttggatgaacccgatttcaacatcaatctcttgtgccatgaaatggcaatgagccggacactattctacagtcgccttaaatcactgacgggaaaagggccgcaagagtttatccgtatcatacggctacaaaaagctgccgaactgctgaaagaaggtaaaagcgtaaccgatgtcgccgccgaaaccggatttgtcaacacgaagtatttcagttcattgttcaagaaacaattcgggatgcagccaagtaaatatagtgggaagtagacaaccattcatgttcggttttgaattagaattagctcgtttccggtacagtaatgaactgtttcagcctattctgacaagggtatattctcactgcaatgagaaaaagttctcattataatgagtatttcttctcatacctatgagtattttttctcatagtgataagtacacttgagaatgtttacgaaagtttttttgaattataattgtatgagtttacctcatttccgtaccgttcttaattaaatgggaattttgcagttaaatgagaaattatcggttaaatgggaattttgcagttaggctgaaagccttacaattatatatttattggggtgccctgaaagggcttaattatatagcgtagggcaacgccctacgaaaaaaacacaccagccacaagccctgaaagggcggaaccgtatacaattatgccctttctgggcgcaaattcagattgtcgcttttacgtagggcgttgccctacgctatataattaagccctttcagagcactccgcaaaattatcatttacctcattcttgtatagcaacaatcttcgaaaaagaatgggtaagataacgtccgttcgataaaaatcagcagatttgtcagcaatcaaacctaatatgtcagcaatctgaccatcgttttagccggatattagcatctttgcaccaagctttacaagtataaagcacatattacgtttaacctttaaaatgctaaaacgatgaaaaaagtagcactattcctatttttatccgtttgcttcgcgcaacaatcctgttcgtcggattctgttggaacggaaccggaggaaaatccacaagacattctttttaaagacgatttcaactttttcgacgaaaaagtatggacgaaagaaactcatgaacccggctggaccaatcaagagctacaggcatacgatgccgctcatgtgtcggttggaaaagacggggataaatcggttctgattcttaccgccgaacgcaaagggaataaaatctactccggcaggatcaattcaaaagggaaaaagagtttcaagtatcgcaagatagaagcaagtatcaagcttcccaagactaacggcggactgtggcctgcgttttggatgatgggagataacgacaaagaatggccggcatgcggggagatcgacattatggaaatgggagaacagagcggaatggctgcgggcgattcggaaaaacaagtgaacaccgccattcactatggccctagcgcagcggctcacgaacagcaatactacaaagccaatgttgccaacagcctgcaagacggcaattatcacacctactctctggattgggatgaaaacaacctgacaatatccatcgacaacgtcaagtttcatacgttcgacattagctcgaacacatacttccacgataacttctacattctgttcaacctcgccgtgggaggtgcgtttacagggattaccgacattaataaactgacgggcctgaaagacggtcagaaagtgaagatgtacatcgactgggtgaaaatattataggaatcttaaatatatatgctatgaatatggaaaaatgtaagtatctactgttttgcggaacactcgccctttggatggcgggaggtttccagcaagtgtatgcagcaacggaaccaagttcccaggctattcaacaacaaagcaacaaggtaaccggaaaagtgagcgatgccacaggtcctatcattggggcttccgtagtggagaaaggaactgccaacggaacgattaccgatctggatggaaatttcagtttgaatgtaaaagcgggagctacgctcgttgtcagctacgtgggttataaatccgaagaagtaaaagcgggaagaggtcctttgaacatcaccttgaaagaggatgccaaagcattggatgaagtggtagttaccgcccttggcatcaagagagagcgcaaagcgttgggctacggcattgatgaagtaaaaggtgaagccttgaccaaagcgaaagagacgaatcttatcaactccatggcaggacgtgtgccgggcttggtagtcagccagaccgccggtggtccttccggttctacgcgcgttattctgcgaggcagtaccgaaatgaccggcaataaccagcctctttatgtagtggacggtgtacctttggacaacaccaatttcggcagtgccggcacaaacggaggcttcgacttgggcgacggtatttcgagcatcaatgccgatgacgtagaaaacatgtcggtattgaaaggccctgcggcgtctgcactttatggtagccgtgccagccacggtgttatcttgattacaaccaagcgagccaacaaggataaaatcagcgtggaatataacggaacactgactttcgatacccaacttgccaaatgggacgaagtgcaacagatatacggtatgggaagcaacggtacttatagctatgatgccatatccaacacaaacaaaagttggggccccaaagcggacggttcaaacatgttgaagtatttcgacggcgtggaacgccctttcctcattgtccccgacaatacgtccaacttcttccgcacgggtatcaccgccaccaactccgccatcataggtgtgaacagcggaaaaaccggaattcgctttacctatacggatatgcgcaataaagacattgttccccagacacacatgagccgtgacattttcaacctgcgcgccaatacgtctgcaggaaaggtagacctggatttcagcgtcaactatacacgggaagacgtgaagaaccgtccggcactgggtgacagcaagtccaatatcggtaaaaacctgatgacccttgccaccacctacgaccaggaatggttgcaaacctatcagactgccgacggcgaatattccaactggaacggtatggatccctacaacgtgaatccgtattgggatatctataagaacttcaataaatccaagaaagacttgttccgcatgaacggcaaggctgtatggaacatcgacccacatctgaaacttcaagcaacattgggcgccgaactcaactggttcacgttcgatgattacaaagcgcctaccactcccggattcgaagccggaagacttcaaaacagcgctttccgcaaccgcatgtacaactttgaagtgttggctctctacaacaaccattggggtgatttcgatttcaacgctacgttaggcggcaatgtatataaggtgaacaaccagaccaccgttaccaccgctcaagacatgaagatacgcgatgtcccttcattgacgagcttcaacgagatcagtgtagtgcccggcagttaccgcaagcagattaattcggtttacggagcagtgaacgtgggatggaaacacatgctttacctcgatgctacgttgcgtggcgaccaatcgtctacccttcccactggcaacaacatgtatatgtatccttctttctccggcagctttgtattctccgagctgacaaaactgggcgacctcctgccttacggaaaggtgcgtatgtcatgggcgcaagtaggtagcgataccgatccttatcaattgggactcgtctatacgaaatccaaatatgcttatcccggatataccatcggatatatcgataacggaaccatccccaacaaaaacttgaaaccaaccaaaacaaactccgtggaaatgggattggaattgaaattcctgaagaaccgtatcgggctggatttcacctactattctcaaatcagtaaaaaccagattatgggaatggcaagttcctggacaaccggttacaactatcgcttgattaatgccggcaagatagaaaacaaaggtattgagattgcccttagcacacgaccgattcaaacacgcgatttttcctgggacattaatctgaacttctccaaaaacagcaacaaagtaaaagaactggatggcgaatcggatatgtttgaactggaaaaagcatcttggctcgacgttcaggtagccgctaaggtaggcgagaactttggttctattgtaggcccggacttccaacggaacgaaaagggagatattctgattgacccgcaaaccggtctgccgcaatatgacaagagcaaccacgtattgggtaatgcctcttgggactggacaggtggattgctcaccaactttacctacaagaatctttcgctggtagcggtattcgatgtgaaagtaggtgccgacctctattctatgtctgcccgtgctgcttacgaatcgggtaaaagtccggagacactggcaggacgcgacgcctggtatcgctcggaagaagaaagattggcagccggcattgcgaaaggagccgataactggaagccgacaggcggattcgttgctccgggtgtcatcgacaacggtgatggaacatatcgtcccaacgacatctacatcaatccggaagactactggatgagcgtttgccgtaatgcaccttctatgtttatttacgacaactcatacgtgaaatgccgtgaactgacgttgagttacaatgtacccaaatcctggctgaagaatgtagtaagcggactgaccgtttcgttcgttgcccgcaatccgttcatcgtatggaagaatatcccgaatatcgacccggattccaactacaacaataccaccggtatgggacttgaatacggttcgttgccttcacgcagaagctatggttttaatgtaaatgtgaaattctaaaaagatatatcatgagacaatctaaatacatcacaatcatcacgatggcatgtgccctgtttttcgcttcttgcagcgatgaatacatggaaaacatgaataccgacccttccaaggccgctaccatcgacccgaatgcgcagctcaccactgcccaactgcaaacgtacggagaccttagtatgatggaaatctaccgtaactaccattatgcattcacccaacaactgatgggatgttggaacaccaccaactacggcggacgccatacgctagataataatgaaatgagccgtatctggacatcgttctacactcaatccctgaagaatatcattgatgctcaatatcgcacagccgaagatgcagagaaagtgaacatcaactctgtgctccgcatttatcgggtttatcttatgtctatcatcaccgacacttacggagacgctcctttcagtgaagccggcctgggattcctcgaaggaaagttcaatccgaagtatgacaaacaggaagatatttacaacgctttctttctggagctggaagatgccgtcaataaaatcgatccgaccaaagataaagtgacaggtgacctcatctatgccggtgatgtaactaaatggcaacaactggcaaactcgcttcgcctacgttttgccatgcgaatctccaatgtcaatcctacaaaggcacaaacggaatttgaaaatgctttagctgccaatgggggtgtgataacggacgcctcaagcgatgcgctcatcaaatacatgacaatcgcatttagtttcggacaagaagcttactctgattatcgcggaaattcattgtcacagttattgttcggcaacgaccccgctaataatccaagttacctctgctccactttctttaatcagctacgccaatccggtgaccctcgtacattcaaaatttcccgttgttattatgacgggctgatgagtgccaccagtcccgacaatcgtgtcgacatcacccaggagatgattgaaaaagggattgatttcagtccgcgcaacccgggtgcctactcgtgggagccatggcctacaggatacgacagcgatatttgtaaggaattagccgttaacaacccttctgttacagcaaccatggctcgtgaagtggaacccaaacttgccaataatttcctaaaaagcgacaatccgggcgtagtgatgacctctgcagaagtgaagttcctgatggcagaagctactgtgaaaaaatggaatgtcggcagtgtgtcggcagaagatctttacaagcaaggagtgcgtgcagctatggatttcctgacagacaactacggttgcacggctactactgatgcagagtttgatgcattcattcaaggtagagggacgttcggacatacggacaatcagaaacttgaagctatcaatacacaggcctggattcttcacttcaccaatcctgccgaatgttgggcaaacgtgcgtcgttccggttatccgaagttgaaatcaccggcagaatatgggttcggacaatatctcaccggtggaacggaaattccggtacgtctctgctatcctgtattggaatcttcctataataagaaaagctacaatgaagccatcgagcgcatgggaggaacagataattggcacagccttctgtggtgggatactgaaaactaactattaaacaatcatccattatgaaaaagatatatattgcactatttgccctactcgctgtaggctccacatttactgcatgcaccgaggaagagccgttcgctacggtgacggaaaatgatgatccgcatatccttgccccggtattccctgacaggacgaacggccaattggctacattcgccaacatcagccgggatgcgaacttatccatcgcgctgaccgtgactccgaaagattacaccacagtaacctggttcattgatggacaggaagtagaatcgggtaccgactccgacaaagaaatcaaccgtagtctgaaagccggtacgtataatttgaaaatagaagtggaaactgtgaaagggaagaagacttcccgtgaaggattagtggtggtcaacccattggctgatgaccctcaatctaaagaagtagcctttgagagaattgtatctcccggtaagactgcccgtttatatggcagtaatctacaaaacgtaacagctatcctcttgggaggaaacacgatcaccgatcctacttatgttgaatcggaagacgagaactatctggaatacatcgttccgacaggcgtaagcgaaggcgattaccgtatcgttctgcaagatgccgccggcaatgaatatggagccgacatggtgaaagtgaccaatgcttcccttgtcatttcgggggctaaccgggctactgccaacgtggactggaccatttccggtatcaatcttgaaaatatcgcttctctaactatcggcggacagacggtgtctcaattcagcaatcaatcttctacggaagttacgctgacttgtccggagttgtctgatggaagctatacgatgacaggcaaaactcgtagcggagaggctgtgcagttcttaaacgacaatgttacaactaccgaacagactgtgaccgtatctaccgaaataacgctttggtcaggacaccattacgtttcgtgggataagccggacggtgatcccaacaagagtttcggtctgattccaaaagatgtgtttgccggtatcacagccggatcaacactgaaagtagtctactccatagaaccaactgccgaatatcatcagatgcaacttgccacaggttggtggactggcctggcagataagatagaatttacggaaaacggtgaatacacactggtactgacacaagagatactgaataagattcaaactgaagacggattcttatgtacgggtcatggctattatgtagacctggtaaccgtgaaataatgttcctaagtaagtttaaaaatcattcataccataagtatctgtcattcttcaggttaaatccctctgaatgacagattacataaacgatgctacttaaaaacaaatcataatgaaactaagaaatattatattaatgaccgcatctatcgcaatgactgcttgttccaaacaggcagttcccactgccattcctgaagacgcaaaaatagaacaacaagtggaagagcttctatcaaagatggacctcgatgccaagattgggcagatgaccgagcttgccattgatgtattaggagagacgataaatggtgaatttcaattggacgaggcaaaactccacaaagcgattgctgaatacaaggtaggttcgtttctaaatgctcccggcccggtagcacaaagccctgaaaagtggaacgagattatcggtcgaatacaagaactgtcgatggcggagattggtattccatgtatctacggtctggatcagaatcatggtactacctatacattgggcggcacgctctttcctcaaaatatcaatatgggggctgccttcaatccggatttgacctacgaagcggcacgtgtaacggcttatgaaacaagggctagcaattgtccctggacatactcccccaccgtcgatatggcacgtgatccccgttggccacgtgtatgggaaaattatggagaagactgtttagtcaatgccattatgggcagcactgctgttcgaggcttccaaggagatgatcctaaccatattcccgccgaccgaatcgccacctccgtgaaacattacatgggatacagcatgccacgtaccggtaaagaccgcacaccggcttatatatcggtttccgaactgcgtgagaaatgttttgcaccgttcaaggcttgtgtggaagctggtgcactgactataatggtcaacagtggttccatcaacggaaagcctgtgcacgccgaccgcgaactccttacacaatggctgaaagaagacttaggatgggacggaatgttaatcaccgactgggcggacatcaacaatctttatacccgcgaacatgtggcggcaaacaaaaaagaagccatcgaaatggcaatcaatgcaggtatagacatggctatggaaccgtatgatctcaattattgtacactactaaaagagttagtgcaagagaagaaaatacccatgagccgtattgacgatgccgtccgccgggtgcttagacttaaattccgtttgggtctgttcgatcatccgaacactttattgaaagattatcctctcttcggcagcaaggagcatgcacttatcgcacttcatgcagctgaagaatcggaagtattgctaaaaaataaagataatattcttccgcttcctcaagggaaaaagctactggtaaccggtccgaacgccaactctatgcgttgcttgaacggtggttggagctattcatggcaaggacatctgaccgatagatttgctgacaaatataacaccatttacgaagcaatctgcaacaaattcggagccgatcatgtccgtctggaacagggcgtaacctacaaacccgaaggtgcttacatggaagaaaatgaaccggaaattgagaaagctgtggccgctgcccgcaacgtggatattattatcgcctgcatcggtgagaattcatattgcgaaacacccggtaatctttccgaacttgccatctctgccaaccaaagcaaactggtaaaggcacttgccacgacaggtaaaccgatcatcctgatactcaatgagggtcgtccccgcattatcaacgacctagagccattggctgatgctgttattgacattctattacccggaaactatggtggcgatgcattagcgaacattctggcaggagacgtgaaccccagtgccaagatgccttacacatatccgcgacacgaagcagcactgactacctacgactatcgggtgagtgaagagatggacaaaatggaaggagcttacgactacaatgcggtagtctccgttcaatggcctttcggatacggattgagctacaccactttcgaatacagcaacttccaaacggacaaatcttcgtttaccacaggagatgatttgcacttttccatagatgtaactaataccggtaaatatgccggaaaagaagttgtcatgctattcagcagtgatcttgtggcttcgcttactcccgaaaaccgccggttacgagccttcaaaaaggtggaactgcaaccgggcgaaacccaaactgtcactctatccatcaaaagcagcgacttggcttttgtcaattccgatgggcaatgggtactggaacaaggggatttccgtatgcaatgcggaaatcaagtattgactattacttataagtaggcatttataagtaggtatttataagtaaatgcacattattaatgtatacactcccgacaataactctatgagacactgcgttactttgtggtgaactcaaattatcatctaaccagttgaacagcctcaaacggctgttcaaccaaatttaaacaaccgctcctcttgatccaaacgaccgtatgtctacaatcgtttgagtccaaaggagcggttgtttttatctgaaggaaagcggcattattacaaagggtattcctcaaaagcatacaaaatggtagataaataacgttcacctgtatcaggtaataatgcaacaatcattttcccggcattttccggtcgcttcgccagttccgtagcagcatatacggctgctcctgaagatatgcctaccaacaaaccttcctgtttagccaattcacgactcgtacgaatggcatcgtcattctgcacctgaataatttcatctacgacagaagccttgtacgttttaggaacaaaccctgcaccgattccctgaatcttatgcggacctggttttcctcccgagagtaccggagaatcagaaggttctactgccacgatctttatactcggatcacgcatcttcagcgcttcacctacaccgctaactgtcccgccagtacctactccggccacaaagacatcgactttcccctcggtatctctccatatttccagaccggtagtccgtaaatgcatggcagggttagcaggattctcaaattgttgtaaaatgacagctcccggagtgaccgccttcagttcttcagctttggcaatggctcctttcataccatccgcaccaggagtcaatactaattccgcccctaaagctttcagaagattacgccgttcgatactcatggtatcgggcatcgtcagaatcagtttatagcctttagcagctgaaacaaaagccaaccccacgcctgtattcccgctggtcggttcaatgatagttgctccgggatgcaaaattcctttcgtttctgcatcctcaatcatagccaatgctatgcggtccttcacgcttcctgccggattgaaagactcaatctttacaatcagacgagctttcaggtcgttacttgtattatagttactaagttccaataacggagtgttacctaccaaatccgtcaattttcttgctatcttttccatatatatctgttttaaatttctcttgttttaatatatgacaaagatagtgcggattctgttcagggtaaataccatatatgtggtaaattcataccacatatatctgacttcctgccagatattatattaagaaatcagctctcatagggctgaatgtatcaatcaatacacctgcttccagacaaacacatccatgaggctggtcaggttccacataataaccgtcacctgtagaaagaatttctttccgatcgccaatagtcaattcaaacttgccgcttgcaacataagtagcctggctatgataatgttgatgcatagaaccgacggcacctttctcaaattccactttcaccatcatcagttgcccgtcataccccattatctggcgacggattcccggagccggtttctccaaatccaattctttctcaaactgaaaagcatcactgcgtgttttcatcttccaatctattcttatttataactatattatttgaatctcttcacataatctgcaatcagataacatgccggaccgagtacctgaccatgatcgaatccttgcatttcgtacaaagtcaccttcttgttacctatacttttcaagacagcttccagcagcgcattttcttcatatcttgccgccatctccagatgcttgtcccccgtaatcaacacgagaggagctgtttccttacgagccttatttaccggagcatactcatcaaccaccggaataccgtcaggcaaaccgcgttccttacgaatagtgaaatgtgtcaccgtctgaccactcaccggaagataagcagctacactatcggcatctgctccgtatgctgccatgtactttttatccattgccagaatcaacgaaagatagcctcccgcagaatgaccggaaacaaaaatgtgatccttacgaccaccatacttctcaatattcttgaaaacccatgccacagcttcagccgcatcttcgatgtaagccggattctttgctttcggactcaaacggtaattcaccgccactactgcaaacccttgttctctcaattctttgggaataaatttatttccaccttccataccaccaccgtgaaaccagacgatagttgagaaatccttcttgttttcaggataataaatatccagtttacaacgttccaaacgataggtatccgtttcggaaccagagacataagatatatctttgtctgtgcgataagcattttgtgcttgagcaatgcaagtacaaaacaaaaagagaagaaggcaaatctttttcatgatcttatttatttcagtattttttagtattctttcccaataagcagcatacaaccaaatggcatccacgtttcttataaaatgcaatattacgaaattctaataagaaatagtccttctacatacagctaattctgttcatgcaaaaaattattcgtctgacgactgttgaactttcgtctaacaactgtcagacaaaaagtatacagttgtcagacgaataaagttattcagctagaaaactagtcttctgtatacataagactaattcttatataaaaagcgataacatcagcgtttatcatttcacattcattccttcagccattgtatacatatccggcaaatcggcagagaaaagcgaaaccggactttcatacatctttataaaactcttttcagaggcatgccctttaaaaacagagtagaaatgcgactcactttcactaggatcatatttgtttctccacatcacaatcatgctgacaaactgtcccgtagcaggggtaaggatttgctgtgtccagtagtttttctccggaacaccatcacgttgaataccctctactccggtttctgtaaccccacacggttttttcagttcttttgacagacgagacaaggtattcatattggtagtcagcacaaccggactcaaaccatgataagaatccattcctaaaaaatctacataatcattgccgggccatctaaataggaagttctcacgtccctgcacagaatctatttgcggggaaatcgcataaataaggttatgcacattttttgtgtcccgcaaataattgacggtaaacttccaaaaggaagtaaattcatcactagtcgtacatgaactcccccaccacgaccatgtttgggtatgctcatgataagggcggaaaatgaccggaactaattcaccattcttacctttcaaattcagtgcaaaattcgccaaacgatccagccaagttttaaatttaagatgtgtaagacttccctctttaagaatctccttcacaacctcattactggaattatcccatgaatcacctccggtcaacggattattcagatgtgcacatgcaataagtacctcgccacgctcataagcctctaaagcgactcttttacggatttcattttccgggttctgataacgatcatccattatttcagcaacatcaaaactgaaaaccgccggatagtcaccacaaacatcatgagtgtcggagcgtccttcctcattataccatttacgaccataccaaagatcatcatgatgtccgaacatgaaaccttttgactgaatagcccaaagattcgaatacaaggctttagtctcggaagtcgcatttttatctacaatggagagttctttcacttcttcatattccggataaagcgccgatacctcttccacatcgctacaactcataaagacggatgctaatccgaccaaaagtatattgatttgctttttcataattatctgtcttttaatctatattcgttaataaaataaaactttgagccttgaggatagtctgataagttccatcaacagttaatcctgtctggacagggacggggtgtccttcattgttagtttgcctattcccttcttcatatacatataaagaaacattctcgagagcagcaggcaaagaaatatccaaagatcgatcctcgtctcctatattaacggcagcaaaaacatattttccttgatattctccagcagccgcataaacacctttcgtgcgatcaagcgttgttttaaggatattagaaccagtcggaaaataacggcacatcaatgaccaagtgtaataccacggacggatttcttcctgcgaagggtcatcgaagacttcttctcctaagatattccacattccccacaacttaatatcttccgtcttaccagaatcaccgctactgtgcattgcgtcatccaacatccaggcagctattcccgaatatcctccattcattacctccatacagagcaatggcatatcaagaccataaaaatagtcgtataccaacatattagaatctgtacctttagtaaacggatgaccttcgacacgccggttatactctttcattaacaacgaatctgcttcacgccaatatttgtaaccggcctctcccaacacaatctttttaccagcaggaataaattccttatggcgagccagaatctccgcatattgcccagaacgtacttcatgttgtccgggataggcatgaatatcgtaaataccgatatgcgaatccaagtcggtggtcgcctgtttcacccagcctgccgcgtcaaatggagaagacggattcttgtaatcaacgactgcatcagggccggcaaacttcactttgccgtctagtccgggatattctttcatcttatccgcaaaacggagtaacatggatttccacaggtcgtagtcaccgtcagttgaagcccaattcccatcaggttcattaaagatcacaaaatatttgatacaggaaaagccaagatcattgaccagataattcaggtaatcgacagacatatccacccaacattgttcatccttcatagcccaagtagggggattatattcaccatacatcaccacaatattatgatccgtacaatactgcaacaagcgggaaagtgacgctatattacgtgttttatcatactttcccgtctgcggatcataataacgaaaaggactgttaatcatacaacgcacataccccatacgcataaagtcaaggcgtttaaacagtttctgccagtcttcgtcagaaacggaggctccccatgactcggcttcatcgtaagggtcccactccacaccatttcctatgtaaccggaagtaacaacctcttgagatacattcactgtcagccggttgtcagagtgcgcacatgaaacaagcaacatccccaccacaaaagttcctattattgtttttaaattcatcattctgtttttaataatcgtaattagtatacactatcagtgattctgccggcatagtcactgtctctcctttctcaaggtgaagaatcaagttctcatcattcggcaaaaggagacaatctcctttctgtttcaacgtaccgtccgaatagatgaactttttacaacctgacagagaagaaagaacatcactttttagttttaccgttttgggactatcagaaacattcaccaaagcaatcatatatttcccatcttttcctgatacggcagcctttacgaaaggctctccggtggtgtctgttctataaaccgcagttccggcaggcatatacctggtcagtaacgaccaggcataataccacggacggacgttttcctcttctgccccgaaacattcttcaccgaatatattccagaatccccaaatcttcagtttgtcaggtgcttcattagagtgcatggcatcatccagcatccaggcaatggaacctgaaaaaccagtattgacagtttgaataagagcatctgccatatctgttccatacatataatcataaacaaacatctgcgaatcttccaacgaggcgttaactttactcctggctctacgaatattctccttctgatacaaagaatcagccttttccacaaatttaaaaccaatttctcccatcacgattttctttccttcaggaatcttctctttataggcagcaataatatctgcatattctccagaattaacggtgactttagacggataagtatggatatcgtaaagttctatttgttcgttcaactgcactgcacagctatctatccatcctgtctccgctttatcccagatggcaatatccggaccgacgataccaacttctccgatcaagtcaaattctttcatatattgataaaactgccggacagatgatgcccaaagaggaaaactcttattagtggcagcccaataaccattcggctcattcactagattgtaatagcggatacaagaatatcctttattatgaaccagataatcaaccaaggcagctgcgtgacgaagactttgactgtcaatctctgcttcgcgggcacgaatgacactccatccccaatctccgaacatgacagtcacattacgactctggcagtagtctaacattttggataatacttccatcccccgttccggcaccaatctcccctggtcaacaaacgaagaagtattaatcatgatacgaataaactgcggacgcataaaatcaagtctgtcatacagtttctcccaatcggcttccgaaatagttagtttacctttgccataatccagttgataaggatcccactgcgccccattacctatatagcaatcatttagcaccgtttccgtatctatggtgattattacatcctgttctaccggagaacaggatgcaaaaaaggcaactataaaaataaagaagtatttcttcatattttatcatccattagttaatcctcattttttgtcacgagtacaaagaacttacgtgcctgtttagcaaacacatcataatcagtataaatataggtccactcatccacaccattgatttggaaagagaaagcattattcggcaaagttaccgtattggtataacctcccccctggaataatgtataagttcccggattttcgagtacggcagtcgattcatttccgtccgaatcaataaaagtaatggtacctaaactgtaattacgaatccaacggctctctcctactgggattttccgataatacttcttcagatcaatatccgtcttatctgccggattagaagaacctttaaatataaaatctgcatatttcccgtcaggcccggcagcatttatacatttcccggatgtgtttccatcatctgtgatattctccataataaaggtcagtgtattgtcatactctttttccggggaatattcatcataccagcaccatgatttgtccataaacggataaactcttccgccaccccattccggacctgtaccaccataaataatcaaattattaatcgaccatgtaccttccagactttcacggaattcattcacatagatcatatattcacgtgtttttccagttgcggaagttacagtaagaaccgactttcgctccggattactaaaatccaatgtactgcctttacctgcagaagctgtggcttgatacgacaattcaatagattctatttcaacttttgacaaatcaggaatagcccccacattaagggttacggtaacttccccggttgtatcatcaatgcgttcaatttcagcctgtcccacctggttcttgaatttaagattcgttacagacctctcgttattccatcctccatcattcaaatcatcctgcatgtctttcacacaagattgcattacccccatacaaaggataaacagtgtgtattttaatagtttattcatagctcacgattttttattattctcttaaacttggattaagattaatctcggtttgcggcaacggatagaaagaatattgactttcatttagtccggcatccttcacttctttgatttctccaatcctgccccaacgacgaatatcgtacatacgatctccttcaaaagccatttcaaacttacgttcttcatatactttctcccggaattcatctatcggcaatcctggagtcaaatcccccaatcctgccctatgtctgataaagtttatcagttcataagctttggtagtcgggccggcagcttcggcatacaccatagcaatgtcagtaaaacgaatgagaaaggggcgtgtactagtcttatccccatcaaatttgggatcgatgtattttcggcagaaggggtactcaaaatcaccgccatccggtttccattccgcttttaccgttccatcttcattatacaccttgtccacaatgagatctttcttacgcaaatcgtttccatcaaactcattatagaaattcatttccgtacgatattctccccaaccgtcatgagattttatatattcatctttgtctccttgcttgatccagatagtagcaccctcaatataaggaaggaacattttggatatcttagaatattgtccttctgcctctcccgttctatccatagacatcaagaaaatattttctttaccggcaaagttctctacatcataaatcttgagcaaatcactttcaaaaccatacgtattctgcggataatccggatccaatcctaatgctcttccggcataagtcatagcatcttgatagagagaattgacatctttcgccatttccttgtataaaggcacattatttgctttggcagaagctgcatataaatagattttagctaacaaagcctgtgcaccgactctatcgatacgtcccattatgggggcagcgtatacaggcaacaattcttccgcttttttacaatcgtcaatcatcaaatcataaatctcatccatattatttgccaaaggagtacccgtttgcgacagtgtctccactactccataatgcatcggtaccaaaccgaagttacgtgaaagacagaagtaattgtatgcacgtaaaaaataagcttcacccaaatactgatcctttagcttggaatcaatatccgtacccggcatcttcttaatgacagcattcgcccgattaatagcaatgaatgagtatttaaagaaattgaccaaagtagcattggtatcaaagttatcaattctccacagattcaaggcacgattatcaacagaggcatctcctttagtagtcataatttcagtaggcatatcaccgatgaaataaagagcacgtgaatactcgatataggtaagagtagcataagcgtaatgaatagctgccattgcatccccctctgttttatagaagttatcttcggaatagaatccgtaaggctcttcatcaagactgcaaccggaaaagcccaggatacagcttattaaaatgaaagtgtatatattctttttcatatcatttaatttagaatgttatatcaagacctactgtccatttcctcaagcgaggatacccaccggaataaattccgttttgcccgacttccggatcatacccgtcgaacttggtaaatgtatataaattggaagcattcatatatagccgtattttcgaggcaaacactttctgtttaggcaaatcaaaagtataccctactgtcagattctggattctcacaaaagagccgtcttctatccaatagtcagaaaagcgagtctgacgtccgtcacgcagactgggatatttgttagtcgggttgtcaggtgtccaacggagtgcggcattatgcggatcaccaaaagtcttggtgttcaacacatcattcccaaacacaccattcaggaaaatactcgcatccagtttcttccaacggaaagaaagattcagacttgccgtaaaatcaggattaggatcaccgataatacatttatcgttttcattcacaacaccttgtgtcccgtccccatcatacgtattgacatatttgaattctcccggcatagcatcttctcccgacaatcctgcgttaagtccttccggcaaagtctgaataattccatcacatttatatccataaaagacattgatcggttggccaatagcaagtatattagtataagagcgatactgttcactcaagttaccgacaacttcatattccattcccgtacgggcatctttcaatagacccgattcgacactacttcccaaatcaagcaccttgttacggttcatagagaatataaaagttccattcaagctccaatcttttttatctaccataactccgtcaatcgttacttcaaatccccggttgcgaatcttaccatcattcacccacatgcggtcataaccggaagaaagggccaggtttctttctctcaacaggtcagacgtctctttattgtaaatatccaaagtgacgcgaagtcttctgttaaagaaagccatatcaataccaaagtcccattgcgcagttgtctcccatttcaagtccggattaggaattccactccaaattttccagattccgtcttgtccggactgccctgactcatacccgggaccgatagcagtcagccattgtccctgatggtaatatttagtcgttccataacggctaagagtctgataaggactgattccctgatttcccgaaataccgtaacttaaacgaaacttcaattcatcaaatgtatttagtttctttataaacttctcttcgtgagctttccagctgatagctccggaagggaaatacccccacttgttattcttaccgaatttagaagaaccgtcggcacgaaaagtggcagtaagcaaatacttattatcataagtgtaattcagacgggccattccggaaaccagtttacttttcgagaacccgttggaaataatattgttcgctttctctccggctcccatattctcatttcccaatgcttcattcacaaaaccattagcagtcagatacgaatcacgatattgataccactcgtaagaatgacctaccatggcgcccacttcatgtttgtcgaacatttgagagtaattggcaaatgtttcggaaacaaaattttgattctctgtgttaccaatgactcccctaccacgattctccgtaccgacttgggtgtatttctgtggcagatactggtcgttggtagattttccatatttataattcaactggcttgtgagacgaagttgcggtatcacttgccattcaaaagccccggatgagataacatccagcattttggttttatcctttttatgctcgcgaatagcgataggatgactataatcttgagcagtagtctgataataagttccgtcttcattatacacaggataaatcggatttctccaataagccattccgccattgttattacggttgccaagatatagaatattggatgcacgaatcgtaaaattcttatatatcttatgactgacattcagattatacccccctttactataatcatcatcaatatacattccctggtccgtataataattagcactcaagttaaaactcgtcttctcgttagcactggagacagaaactgttgtattattagacacaggcgcatctctaaacactaattcatcccaacgggtattggttgtccaagtagtctgaagctcctcaatagacgggtaataaacaccggcagaattatttgcaccgatatagagcggctgtaatccaccattcacacgtccctcattgttcaacattgccatcatcaccgggtctctccacaaatccagtttggaagaaaattcagagaaagtgagctgctgtttgacagataccgtcgtagttccttctttcgcccttcgagtggttacaattataactccattagcacctctggaaccataaattgcagaagcagaagcatcttttaatacttccattgaaacaatatcatcggtattaatctgtttcaaatcaccggcatctcccaatggaaaaccatctaccacaatcaaaggtgaattggatccgcgcagcgaactattaccacgaatacgaaccgttgatccggctcccggatcctgtgacgaattgattacttgtacaccagccgcacgcccctgcaacaatccttcaacagaattagccggtatatcacttaatgcctccggctttaccgtcgcaaccgatcccgtcaaatcactctttttcaccgacccgtacccaatgaccaccacctgatcaagtaattgagtagcatcactaagtaccgcatttaccaccttttttccggaaaccgatatttctatactattcatacctacataagaaaactctaaaaccccattcaccggcacattggccagagagtaattcccatcaaaatcactgactgttcctacagccgaacctttaattttaatagtagctcctatcagaggctcaccttgtacatctttaaccactccagtcacagtaatcttggaagatgtttgctctaccgcagcccatgcggtagaaaatacggacaaaaaaaggcatatcaacacaactttgcagagtgacatgctaccaagccgttttttctgtttattcatcataatataaaatttaagcgttgaattctttactgataatttgataatacaaatatagactataacctttcattttcattcgcactatttactctattattatacttttttgaacgatttaatctatgattatctatttttcgcatagcaacctccccaatgtacacataaacagtgtatacacatcacattaaaagactaaaagataaaggagattcagttaattacaccttgcagtcggtcaacaagtaagagagcagttcatttacagagcaggtagccacgcagacatacttatccgcactaccataatacacaaagagcgtatcatccacaatcacatttcccgtagggaatacacaaccgttataatacccgtttatctcgaagtcctcttccggttcgagaattgattcatgcgttttggctagtattttcagagggttatccaagtcgagcaataaagcccccaccctataatacccttttccgccatgctccacaccatgatagagcatcaaccaacccttatccgttttcaggggaggagtacttccaccaatcttttcctcccaagtattttcacgtcctgtcagaagaagatggctttccttaccctcccaatctaataaatcatccgaaaactttatccagatagaagggtattctacaccaaatttttcgccaatatactgcttggggcgatgtaacataacaaattgtccgtttaccttctcgggaaaaagaatcacatcgcgatcatcaagcaccggtgaagtcagacgtcccaaacggcgaaaatggcaaaaatctgtagtaacagccagcccagtattacctaaattcttagcaatagctgcaggagcatacttaccacattcaggaagtaaaacttcatcatgcccaaacttccaatactgcccgggtggcaccggccgataggcataagtaatataatactcaccatcaaacttcacaatacgaggatcttccacacatccggaatcaggcccatcgacactcggagaaaaagccggccgatccgagtgcctttcaaaataaaacccatccctgctcgtagccaatcccaagcggataacatgttctctatcattacctgcagcacgatataacatataaaacatgccgttatcatagaacacgccaggattacaagtcaccaaagattcccaatcattcttttccgacggagaaagaatcgggtttccttcaaatttctttaatttcatatattctatttattttattgaaaaataatccaaatcaatgcgcttaacacaagtaacacccctgcccatacctgatagttcttataccagactactgttttcaaggttacatattcttctttcagatcgctaaaagaaaaggtggtgtcagtaagcttatctttacccggagccgcataaaagaaactgcttacataaatcaccattatactgaatatcaacaagaaaggaaccatcaataaaaagtgcaaatcaccaaaaaccgtatttttaaagaaaagtaaaagaaccgctactaccagaccgagaatcaatcccataaaagctccgtcaccattcactctcttattaaaaattccaagaaggaaagccgctacgataggaggagaaatataagaaagcatttcctgataatattttagaagagatccgaatttaccaatttgaggtgcccataatgcagctaacagaataatcacacaagaagcgattttaccaaccagtaccagcttttttgtatcagcatgtttattaaacttcgcataaaagtccatcgtaaacaaagtagaagtagaattcaagatagcactaatcgtagaagtcaatgcagacaacagagcagccagcataatacccagcaaacccacaggcattaattgcatcaccatattaggatataccatatcgggtttatccaaacctggaaataaatcacgggcaatcaatccgggaatagcaataatgaacaatgtgctcatcgtgagaaaaccggtgaatataacacctctccgaccttcatcaatagttctggcactcaaaacacgttgtactaaagtctgattattagcccagaagtaaatacccaatatgggcatccccacgatcagccccaaccaaggagtggcattatcggacaacgggcgaatcagcttcaccaatatatcatcgttttcaaacaaatgatagaaataacttcctccctgctgaaaacagaaataggtaagcaaaaccgaacccaaaatcaaaactaccgcctgtatcagttccgcgttaatggcagaagaaagtcctcccggaattgtatatgaagctgcaataatagcaaagactataataatcatctgaagatcagcttcaggtaataccagtttgataattaatgcggctgcataaagcgcaccggcagcatccagaaaaatatttccgataatacaaatagcggaaaagtagtaacgggaacgtttatcaaatctcttctccagaaactccggaatcgtaaaaaccttcgaccttatatataaaggtagaaggaaaacagcaaaaaacaccataactacaataccggtcaggttataattgaaaacggcaagccccgtatcataagcatcacccgattgcccgataagcgtagtactggatatactggcggcaaacagagacaaccctacaacccaccagggcatggaacgtccggcaagaaaatacgattgggcatccgaactctttccgttctttacaccccaccatataataaatagcaaatatacgactacgattacaatatcaatagttccgatagaaaatgattccatagcattcaattagttattaagtataattcactttgcaaatgtaaggcatataatgatagttttttgatattatattgcttaataattatacttttttgaatagcctgtttttgtattattattattcgtacatttgtatcaagttaaatacagttcttatgaaagacattcaaaaggaaattactcccatttcttctgatgatttattcatcgttttaaatcatcccaatgcaaaatttgattatccggtacattatcactccgactatgaaattaatcttgtgatgaatacgtatggagaaagaattgtaggcgattcagtcgaaaagtttgacaatctggatttggtaatgactggtcccaatcttccgcatgcctggaaaggggagattgtagaaggcaatcatgtggtgacaattcagttctcggacaaattgctcaattttccaatattggagaaacgactattcagcccgattaaacaactgttactcgactcacagaaaggaattagcttttctgaaaacaccatgctggcaatgaaagagaaaattctccagcttacccggatgcaaggcttccacaccgttttagagtttctctctatcttgtatgatctctccactgccgacagacatattttagtcagtaatctctatgacaccaaagacacgatacgtacctcaaaaagtagacgcattgcaaaagtctgcgactatatagagaagaattttgaagaacctatcaaactgggagatgtagcagctctggtcaatatgtcggaatccgctttcagccatttcttcagaaagaaaacaaattgcacctttattgactatatcaacaacctccgtgtggcccgtgcttgccagatgctgactgaaacatcacacacggtagcagaaatctgctactcgtgcggatttaataatctatcgaactttattcggatattcaaaaagaagaaaggaaacacacctagcgaataccgtacaatcctgcaacagatgttgattaaatattaagtgcatttatttaatatccatcgaccaacgatttgatttttagctgtcgggaaaagtccgtatatgaaatatcggtacgaactttcactatcttatcttttcccggcatcaaatcgaaataattatcttcaaagaaattatcaattccatcaagagacaagtatacagctcttgcaaaacggtctgcttttaaagtcaattcatatccgtcaggcagtgactttaattgatatgatatatttacttgcggatataacatctccttttgcttcgtcaagaaataattatttgtgtaaatcgttccttgttgatcggtaagggttgcggagataacaagctgattttccggttgtgattttataaatgaattcaatttgtgggacataacgactttactttcattagcaggaatagttaccgatcttctgattgaattaacaagctttccttccatgtcacagacttccagttccagtatagcgctcgttttccttaatctatcagatacaatatatacatcaagcttgtcattattaactatgggagatacaagcacgtcccgaaaagctgccttggcaaaataatgttgcgctttccaacgtccgtagtaatcacggctcgaccacgaagcaaccggccagcaatcattatgttgccaaaataatgtccccatacagtaaggcatatccctgcgatgtgcttcaatagccgtcttaatagcatccccttgcagtacaaggttcatatacagaaatgattcgaaatctttaggtttgcgatattcgttcagcaaatagtcttcaatcagtttgttcgcgaactcacctccccgttgatgagacatcattacctcggaagttatttcccagtcttcagggtgcggagcatacattttgaccgactcaaattcgggaaaagattgaaaaccatattcactaaagaaacgactacgcaccttattatattcggagatcggcttttttgcatgccatacagcccaataatgcgtatcccctttattattctcggaaactccgtcataacgactgaagggcgatgaaggccaataaaatgtttcagggctgttttcagtcaccacttccggtagcattttatgaaacagatcttcatactgctgccagataatccgggcatactccggattctgcttcgcatagttttctttccaattccaaccaaaccaagcttccagacattcattattaccacaccataaagcaagagaagggtgattgcgcaaacggcgaacattatcaatcgcttcctgacgaatatttcccagcaattcaccttcggagggatatacgctgcaggcaaacataaaatcctgccacacaagaataccatatttatcgcataattcgtagaaataatcatcttcataagtccctccaccccacacacgcaaagtattcatattagcattgacagcatccaggatcgttttctcatacagttccttcgtcacacgaggcagaaaattatcacaagggatataattagcccctttggaaaatacaggtattccattaagttgaaaatagaatgatcttccctctttatcctccttacatataacttttaatgaacgtattcctgtagaagttataagacagtccttattttgctcgtttgtttttacttcggtccggaattcatatagattggcttttccgagtccattgctccaccacaaatttggattctttataaagaagtttacagcaatcttattcaatccttttgtcaggcaggtagtagtagcaccataaatctttccagtcttattgtctctgaccgtaacttcagccttctcaatatctttatcggctagtatttctacaatattactaatgtcggcttgtttataagaaacctctttttgccggataaacacattttctatccgcaaatcatcccatgcttctaataaaacaggtctccagataccagaagttaccaggcgaggtccccagtcccaaccataatgatagcctgccttacgggcaaaaacactaacctttctattgaatactcctccattctccgactggtcgttgattgcctcatagtgaaaaggcagcgcatcccatttaggcatatcccgtttaataggagaatggaaatatatccttaatttattatcctttgctttcaggttatcttttacgggaagtttccattcacgaaacatattgtctgcctccaatatcttttctccattcaaatagacatctgcataagtatcaagccctttaaaataaagccgtatattgtttttatccatcaattcgggtgctacatcgaaggttgtttcataaatccagtcttccttatcaacccactgtacacctctttcatttaagcgataaaaaggatcttcaatgattttattatcaatcaagtcagtgtgtactactcccgggactgtagcaggataccagttagaaagacgagcttgtttaaacctccatcccgaatggagttctttctgaagtgtattggcagatatgttaccattcagagtggaaaatgtagtgaccatagctagtgcaaccatctttaaataaattatccttgttgattttctcataacaactttattgtgtattagatttccatttaaaataacgttgcaaacataggcaattgtcaatcaatattttaatactatattacttaatcattatactttcttgaaaagggtaataggaatttattttatttaaataaacaactgcttatcgacttgataatatatactttcaatgttctatttttaatattatacaaggaaatggccaattagaaaataacgaaccggaaaataaactgcataaataaacgcatgagcatacaaaagaatgcctaatattgtataaaagcaaacaggatatgcatctttctctattcagaaaccgctcattgctttaaaaccaacgaagtgttcctcggtgtgcatcgacttgttcctcaccgaggaagctatcgttccccggtgaagaagataaaaatgaactattaagaaacattttttctctagtttaccataatatatcggaaaggaaaaaataataaaatgattagttattcgggcatttgctctccaaataacaaaaaataatcaaaaatctatcgcagcttgattggcatattttcgaaacagcagaaatagagaatcgtgtaattacaaatacaggacattttcttgcttttctttaccaaactgcaattcacgtccttcttgcaatgattaaatattccttttttaagaatcatcgttttttaagaggctactgattccttcagaaggctctttcaacttttatccttcaatagttcttttgtcttatccgccaaaaacagggggatattaatcaaattaccatcttgtttcaaattcagcattgaatagcgaaccaggtaagcgggttggaaaagcttctcataatgaatcacacttttgatatcagaaatgtgataacttacacatttctgatatgagtttcgtgcgaatctacacattatccatataaaacgaaagaaaaactctaaatattagcttgccaacagctccctgtttatttaaaagtaatcatcagcttttcatcaatacctttatcaggtattctcacactacagacacctgtttccttatcccaactccacgctacagtttcagtgtcattctctaaatcttcttccaagcgttccggtttagttttctttatcttctttcctttgacagttatctctttcggagctttcgcagaataaatacggaacaacagatttctcggaccgggaacagtgtatccttttccttcacgggcagagacggtcagttcatatccatttgccagagtgctacaaataatcggtgttttgacaaattcatcacgctgatatcctaagtcttctccttcatcttcgtagagagtaaaggcagcctgtgcaccttcctgtgcggggaagacttcaaaagtaagtggatataccggtttctcatgggtgtagttcatcaccggcatggtagggatgatggaaccttgcttcacaaacatgggaatagaagacaagggagcgtcaacggtagtccattgctctccggtgtagaccgtctgcttgttgttgtagtctatccatgtaccttcgggaagatacacgttctttgtgcgggcacctttcttcaccacgggggctaccaacaattcacgaccgaacaagaattgggcatccgtagaaaacgtttccatatccattggatattcgagaaacagaggccgcatgataggcaatcctgtatcatacgcttcgcgggcgtaagtgtagatatacggcaacaaacgatatttcagctcgatagccgctttcgcgttcttttccgcttccggcccgaaaagccacggttccaccgggttatctccctcatggtggatacgactcaaaggattaaatgctccgaattgaatccaacgggtatagagttccgccatagccggataatcctcaatatccccacagtaaccggtgatatcacaggaagaaaatgggattaatcccaatccggcggaaagcattacaggaatctgattggctaattgtccccaaccttgcagtacgtcgtctccgtttccgctatcacccgtccagccaaacgtataacgttgcaagccggcataagcagcacgagtcatctggaaaacacgacggtccggattcctcttttcaaattgctccttcaccactttatcccaggtcagaccatagacgttatggatttcatcgtgcataccgagatggtgcttcatcaccaggcgctccgtctgctcttcgttactccaggcaggttcgcccatgtctgtccagaagccggagacaccatcgtcaataggtttctgctgataagttccccaccagtcggctacggcaggcaaggtaaagtccaccactccgcagtttccaccccacggccagggcatatcgtagcttttaccgttcgtattgtcctttacaaaatagcccagacggtctgcttcttcccattgttttttgttggcttgtgcaattaccgggtcttgagatacgactaccttaaaacccatctctttcaaatccgaaagcatctttttggggttttcatagtttcctttgcgccattcgaaatcctgcaaatattctgtccaaccgatatcctgatagataatatcacaagggattccccgtttccggtagccttcggctatttcacgacttagcttttcacttgtcaacagaccgcggcattgagcaaaacccaacgcccatttcggcggcatgataggttttccggtcagtccgacgtattggctgatgatttctttatagtctttaccgaagataaagtaatataccatttccccgttcggcgcttcgaaactgtaataatcacggctttccgttccgaatttgaattccgtcttataggtgttatcaaggaaaataccataccggtaattgctcataaagaaaggaatactcttgtaaagaggatcttctaccacactataacaaggtttgtcactattccacatcttataagactcgccacgacgatccatctttcccgctttctcaccaagtccgaagaagtgctcgtcacgacgaagcactttatattccaccttcttcgttccttcactgacatggcctttatcggcataatcactaaacagaagtttctgatatttatcgaatatctgaagactcatcggagatttattcacccggatacgcaacttcggagtaaatatctcgtaacaggccgcctgttcatccacatgaatagttcctacctcttccagttcttcattaatcactgcaaacgaagcatttcttcgttgcaattgcccatcgggtgagaaccagattttcacgacggaagagctgcaaagttgcaattgcaaggcggcactgtccgccaagtgaaaagtcacctgacgtccctgctgtgtaaaagaagtgcatgtacgtatctcattttccgcccaaacccatgttggaaacatcagacacaacacccacacccataatctatatctaatcatcatacctatcattttagttattctgtagcagccgctttattcagtcacaatcatcgtccaatatttcagggaaggcaatgtgaaagagacaactccgttctcctgtgtaaaggccaattcctgcaaagctcctccgtgtacatccggcgacgctacccacagcttattcacctttgccgacagattcatttgcaaagccgcttttgtaatcaaagccggttccggcatcgtaccgtccacatctctccaactaagactgttcgcttgcgagaaattaagaagatgtatcacttgcttgccacctacctgcttggcataagtagtaaccgatccctgttgaggaggccaactattcaatctcatttcgccattggtacaattcatggaaacactattttccgtaccaccgtcacgaagcagattctgataagaagtcaggaaatcataataacgaaccatcgctgttttcagttcttcgctcattgtcaggttctcattcggaaagtactctttgcacaacatgtgatcgcctcccaactcaaggtgcgaaccacccaaagcaaacatgacagcatctgtcaataagatacccggcgtattaaattctccccggttatccgctttattataattcatataagctgcaaaaaccgtattcaactgataattgccatatactccattttcataaagaatggctttcagattggtaaaatcagcctcatctgcccacacctcattatagaagaaatcaactttacctgtctcccctatctgacgggcaccgtaacggctgaccgcattcatcaccaaactcttgtccggatgagcctgcttcgtcgcttcaataaaagaagcatatccctcacgcagattgaccggaataccgttgtaattgtaaagcgtgctgcgtcgtcccaactggtctatctgatagccgtcgaaggcaaagttcgcatatacatcatcattcctctcgttcaaatatttctgccattccttattagaaggatctaccagataaatattacttttccatccgcccggcagatcatgactatctttagtagtgtgagaagcatccttaaacaaataccattcctccttcaccccgtccgcagcggcatccttcaacgccccaaaacaaagattgtaaaacatagacttcataccgaaacgatgctgcgcttcaatgtaattcttcacagaacttgtataaacctcccggttagcgatgtccatatatacttcgtccaactgcgtacgtgtaccgcccaacggccagtgatgtttattatgccagtcctgaaactgtacccaattgatgtgatgacgattcagatacgccatctcttcctgcgtcttttcagccgtcttctcccgactgaaatcagcgacaaaaccataacggggaaaacgtgccggatcactggatacatctaccgcaatcgtaccgagaatcacatctgtaccattctcctgacggtacagttccgccatatatcctttgaaatcagtagtaggcggttgccatgtccaactggtaccatttaccgactcttctccgacaacctcccctaaaagacgataacgaactttagttccggcaggcaacgcatcttctgctgtaaataccactttctcccccggtttatagaaagccttatccgtagacaggtccacacttaaatccgatgttaccggagtcacttcggtgacactgcccgaagctcctccattctcttggttcgacccatgatcgtcactgcaagccatacacaggaaagcagccaccaaatatattattttcttcatcttgaattcttgttttattgtttcacaatcgaaatcgtctctttcaactggtcaatcgtaatccgataagaaccggcttcctgaatattccatttataatccaaactacccaaatctgtatccggatacatactgttcaactccgcatccgacttagcaacgaacaatgccgtctctacttcccccgtcggagccttgttgctcttatccgccataaaccaatccccgttccagtctgactgcttatcgcaggatatcttcatctcacctgccttcagcgtgccgctccaggtaaagatataaggactgtcggcactcttagtcatcggagtagcattgcctaaatcccatccgttcggagttgcctcacccaccagatacagcccttcgtaaggagtgaacggacgcatcagcatcttttcttttcctttacctgtatagaaccatactttataaggcttgccacattcggcttccttcatctgccatttattatcgtcacctccaagcactacggatgtcgaagtgtacggagcattagccatggtaggatggaagaaagcatccgcctgaccgaaatctgtcacagaagcgaatttaaattctccgtccgccttccagggaatcacggctccataatggaacagatccatttggacagcatctttagacagtgcttcaaatccccaaccattgttacccgtaaacgaaccgacaatgaaaaactcctcatatctccagccaatatcttccgtttcggtaagtgtcaatgtcaggtcgagcaggtttgcttttacgatataagttgcttctttactgattgtgaactgttcgtccggttggtcacccgatgtacggtaggtcagtttgaatccttcttcggcagtagcatcacggttgtacgacggcaggaattctcctaaggtcgttataaatttaaacgatccggtattcagctttcctgtccatgtaaattgtccgttatccgtacgttccattgccgttgcgttatcggcgctccatccgttcggagtagcatcaccaatcaggtaaagcgtcgtagtaaccggctggtaagtagtcaccgtaaaggcagccgtcgcaatctgcttctgatcttccattccggcaacgacggctgtgatacgtgcttccaactccgctttcacggcataaccgataccgaactgcgtattcaggaattggttgagttcttccactttcttagtccattgatacgttcccgtacccaaatctaccgaataaggattcgcaaagtccgttccagctttcgccagttccagcgtataagagatacggttaccgcttccataattcgttccggtagtccatgaaagcgccagcgcctcctggctatggttcttttcgttcaacaccaactcctgctgattcaccgaaagggtgagagtatcatgtcctttatctgtctccatataatcctcggcacaggcaaccatcgttgcaccgatgaaaagagagcataacaactgatatatatatttcttcatcatattatttgtctaaatgaatgattataaaacggattaataaccgggattttgagtcatcaagtgattggagtccatctccgtctgcggaataggcaacaggagacgttctttggtcacattattcttaccgatagatttcaggaatgtcaatgcataatttccattattaacccggatcatatcgaaccagcgatgtccctcaaaagcaagttccatccgacgttcatgaataatcttttctctcatttcggtctgcgtcagagtggtcggcagctctgtcagtccggcacgcttacgaacgatattcaatggttcggcagcctgatccggatgtccctgttcattcaaggcttccgctttcttcagtaagacatccgcataacggtatactacaaaattgttggggttggtattatactccggagagacagttttcgacacaaggaacttacgtacgttataacccgtattcgaccaggaacgtttgtattccataccatcaaaagcaggacaaccctgatacaacacagtgatgtctttccgcaaatcaccgtcctcgtattgcttgacaaactcttccgtaggcaagttccatccataagcaccggctaccatacccgaattacgagggcccatgaaagtagacagccaggatgcttgattatcgccgccccaaaaatcatattccgtactaccggagtattgcacttcgaagagagattctgcaccattattgatcgtcgcattaaagttatcggcataattgcattgagtcagatcatatcccattgcagcaatgttattgcacaaggtcactacttcattgtaatagtcacgatgattaggagccagtgtcaggtaaatatctgctagcatagccattgcagcctctttgcaggcacgtcccctgttggcatctccataactgcttttcggaggaagcatagtcactgcattcttgcagtcggaaaggatttgagcatatacctcatctaccgtattacgggcaatatccgcagattctcccggttcaaacggctccaagcgtaaaggcacccctccgtacaaacgaaccagaatataataataatgtgcacgcaggaaataagcctcacccatgcaacgggtctttatctcatcggagatagatgctgaaggcagattggaaagcacgatgttgcaacgtccgatcccaacccacggagaacgccatacatacaaagcaaagccgttgtcgctctgggctatgaagttggaagcctgaacagtctccaaaccgtcagtacctcctccggctcctacttcactgttgcctgcgatgatgtcgaggctccaaatacgctggttatacatattagatgactgaagagtcttgtagcaggcagtagtcaatgccacagcaatctcgttcgtcacttccgattcgggatcgacgccatatttgggatatttatccaagaaatcgttgcacgatgtcaatgccagcacggcagacataaataccaaagttattatctttttcatattctttctcctgatttaaaagttaaagttcaagcccatactgaaggtacgtgaaatcgggtaacggctgctgtcgatgccattaatatccacttccgggtcgaagccggaatatccggtgatagttgccacattctcgcaagagaaagagatgcgggcattttccagttgaatcttttgcatccactttttaggcagtgtatacgagagcgtgatattcttcagacggagataggaaccgttttccacaaacctgtcggatacacggcagttctggttcgggtctccccaaatggcgcggggcatagagttgctggttccttcacccgtccagcggttcaatacggctgtggtttggttgtaagcggctgccattccttcgttgtcaacattgttggcgttataaatcttgtttcccgatacgccttgcaggaaaacggagagttcccatcccttataagagaaattattgcttaaagagaagaaccagttcggattcgggttaccgataacggtacggtcttcatcgttgatgactccatcgttattcaaatcccggaaacggatatcccccggagcggctcccggttgggtggcatggcggtttacttcctcccagttttggaaaagtccgtcggtcacgtatccgtagaatacattgatcggataaccggctctaagcatagtcacgtatgagttacccatctgattgataaacatcggggtttcgctgttcaagtccagaatttcattcttgttataggtagccgttaaagcagattcccaagagaaaagacctttcaggttgatggtgcgcagggtcatttccacccctttgttgcgcatcttgccggcattggtaaaggtttcagtagtatcttcaaaaccggaggtgatagggatggaagctttcaccaacatgtctgccgtcttcttgatgtaggcatccagcgaaaggttgacacgtgaattgaacaggctcatatccacaccgaagttggtttggcgtacctcttcccaatgaatattcggattggaaagggtggtagataccaaagcggtggagttgttgttgccgaaaggatagactcctgtattataggaagcaacaaagccgtagttaccgatttcctgattaccggtcacaccgtatccgatacgcagtttgaggtcattcaccggagagttgtctttcgggaaccattcttcctgcgaaatacgccatgccagagaaacggaagggaatgttccccaacggttgttcttaccaaagcgggaagaaccgtcacggcgcacagtggctgtaagcaggtatttatcttcgtaagaatagttgagacgtgccatcagagaaagcagtgcccagtcgctctggctgccaccaatactgtacatcttctcgccgttgtccatttcatggatattatcaaacatgaagatattcttttgagcattcaggtaatcatagttgttccattgggcggaagaacctgccatcacacctacacgatgtttttgggtgaaagtatggtcgaatacaaaataattatcccataggtaggtaaatgatttgttgtcactcttatagcgggaagattcttctaccggattcggtttccagtcgtaagccggagtaaagttgtcgacaaaccagaatttggcgtcataaccgaaggtgcttttcaacttcaaccatttggtaaaggcaatctctccggtgatatttgccagaaagttatatcctttcgtctcgttcgtcatcatatacaacgtaccgatcggattgcggacacttccataccattgcgcttcctgtccgggaccgctccagctaccgtcttcattcttcaccggttgggtgggaagtgctttcatcgcatctccgatgctgtaagttcctccttctttcacgtccgtactgaatgtcagattagtagtgaacttcaaccatttattgacctgagcatcactatttgcctgaaagttgaaacgacggtaattaacgctttccacgataccggactgatcgaggaaaccgccggatacatagtaatgtgccttttccgtaccaccggaatagctaaccgaatagctttgtttcactcccgtacgtagcatctcatccagccagttcgttcctgttcccaataaagaagggtctgcccaataagggtttgtattatcatcattattagacagcatatcattgctcaaagcggcatattgcgcagcattcagcatatcgggcactttagtagcgttctgaatagcccagtttgcgtttaccgttacttttccggcaccttcggcaccacgtttgctggtaatcatcaccacaccgttggcaccacgggaaccatagatagctgttgccgaagcatctttcaatacgtctacccgttccacatcagccatattcaaggaagacaatcccaagtcggtaggaattccgtcaatgacaatcagcgggttactgttattgatcgtacccaaaccacggattttaatggtgacattatcacccggcttaccggcatcgattatctgcacgccggatacttttccctgcattgcctgaccgatattagctaccggagagtctttgatgtccttcactccgacagaagatacggcaccagtcaaatcgctctttttcatcgttccgtaacctactacaacaacttcgtccaatacttccgtatcttcctgcaaggttactttcaacgagtttttcccgttcaccggaacagtctgcgttttatagccgacaaaagagatagtcagcgtgctgttagccggaacgcttaatgagaaattaccgtctacatcggttatcgtaccattcgttgtacgtccttccaccacactggcaccgatcaccggttcacctgtggcatctactacatgtccttttattgaaatctgttgtgcgaatgcactaagagataggaacaagccccacattattaataagaggcggcgttcaaagcctttcgacttcatactctgtttcatgtacattaatttaaagttaatattagggttacttttgttttcgttctctgtgtcattgctgaaatgaccgtgaagcaaaagtatccacatttcatactgcttcttaaagcagatagcaaaaatatagtgatttatacagtatctcacagcataaaccactaaatataagaacgttataaaatagaagtcagactaaaaaagtagtgattttcttattcttccaccttccctatttgcattactttagtctcaaattcatctctttctcccaaagctttgttacggacacgggtccggtaattataaatggtagtcacggaataacggaggaattgcgctatcttggtactgtccgtaatccccagccggataagggcaaagatacggagttcggtgttcaacagttctcccggtttgggttgcatgggttctgtgagcagcgcattaaattcctccacaaaattggggaaaagttgcaggaaagtcatgtcgaagtttgcataaaactctttcagttcttcgtcaaggaattgagaagatttaatggctttatatagttcttccactcttccggcagcagcaattttatttagggaacgacggtataaatccatcttgtcgagataagtggagcattggtccatatatcggccgatatattcctccttgatataattggcttccgaaagcgtatggttcatctctttcagttgcgagttggagtcgtgaagttcttcgttcagttcttgcaacaacgtattggtatcgaccacttcgcgacgtgcggcagcaacctttttcatctgcttgtaaacgaagaaaatggcaaccaacaaaaatacggaaagcaaactgatacaaatcaatgatactttcatctcctgctgctgccgtttggttttcaattggtaagcctggtcaatgataggaaagacttgcgagatttctaacgtacgaaggcgggcattgcaaagagtggcatcctctaaggagcatttcaggtaattgtaggcacggtcaatatccccttcatcgtagacaagggaagcgagtttgcgcaaagatacatattcctttactgccgattttaggtcggcaatagccgaaagggccaggtaatgtttttgcccctgcttgtcgcctttcaaccggtaaccctcggagagagtataagtaagcattgcttttgaatggtcatccaaagaaggtttgttgtaatattccatcagcatacggatggcttcatcgtattgagcatgtacgatacacttatccgccatcaccaatacgtgccccaaagagtcggaagcgttgacctgcagaagagagtcacgatacagatccgtcattcgataatactctttcttgactttctccgtaacggcataatctcccatcaatccgtaaatagtgcgatacagatgataatagtaaccatagagataatcgggcaacgttttcttatcaatctgccccaatagttccaacgcttctttatacattccggtagttcccatcacttccgccatattcatggcagcatcatccaggtaatccagtttatccatgcgatgcgccagttcctctttccgttgagcatagacaaaagacgaatccagattataagcccggtattcatcgaaaagacgtccgcaaaaaccatatcgttgttcatcggaagtagcctccgccaacaatttcttcaggtcagcgatacgcgcctccttttccgctccataagtctgacgatttttaatgataccatcaatctcacgaagtaacgcatcggtactcttattatcttttgcataaagcagaccggaaaggacgattgtcacaaaaatcagaatcacttttttcatagtgccgtatgtattatagttgcaaagataaaagtctttcagaaacttccggctttcaggagaaaattattgcagacggaaaaccaatgtttattaaaacaggaagcattacaaatttattatgaacataattattatatttataataatgtcatcgttggaacaaccatcaatatacagataaattcaaaagtatgtattcacagcaaattcaaactgttctataaatattttcttaaatggatatatattattttgttcatagaaaactaacatagctttcttatagtcgatagaatcaactgaacgaaatgataaaggacaataaccgttggctataagtattgcattacttgttatacgggcagtacgtttattaccatcagcaaatggctgaatataagataacagaactaaagctaggaaagctttatcaaagatactctccttattattgattaattgacaagtgtcttccatagcttctcttatttgatattcattatcaagtggacgataattcgtacccgtaataccaacacgccgagaacgaatatgacgctcaactcccagttctttaataaggatactatgaatgtcttcaatctttcttattgataaatactgaagataatcaggattatctaaaataaaatcaagagcttccttgtgatttagtagcataatggcttcttctttagttttaccttttgcttcttctttttccagcaaaagtctttccgtttcaagaagattatatgtgttcccttcaatttgagaagacttccaactaagatccacacctaacctttccatttctttccggtactctccgtctgtcatttctaatacatttcttctaaacgtttcttgaagagccgttaaatgtttccgttcatccatcgtgaaagggtcaacattaggcaatatatcaggaataaggctgaaattgaaagcttgttgaatttcacgctcatcaacttctttccgaaagtatgattctaagtcgaaataacttgtaacaaacgtttgtggtgttagtttataacaggtggcaggtccttgccctatgacttcaatacttccagcggaaatcatggcagctaataaacgcttgaatgtggcgacacttactttagtattcactccctccattaattctgacctagaagatagaggatgaaaacgaagatattgttgaatttcttcttccattgctatttaattgattatatcggctcaaaaatacataatattattaatatatcggctcaaaatgagccaataattacagtgtataggactcttttgagccgatatgaaaatcttcagctacctgttagtagtctcatattgtttctgcattgctttgatctattcttcagaattcttatttatcacagcaattttatcctgtaattctttattctggatttcagataatctcatctgttcagtatggatcttctgactgtcctctgtggtgaaatagttcatttacgtacgggtttggctcattctctgtacggttttgaataaaataatggagtattctggaaacgttgtggtaaatctgaaaaagatgattgagtttttaagattccccgttatctttttattataagatatgggtccaggtgaggggtggtgagggtagatttataaccttttattttattattttctatactatctccttttttatcctcaaaaaaaaatacgaaagttataaatctaccctcaccacccctcaccctggacccattcattagcgcaccgtttaactcgtttctatgcactaatgaggtaaatacagttttttgaaacgctatccaatagaatgattatatttgcattttgatataagaaacaaattacaaactattaatcagtaaaccatgagattcagcaacgtaagattattagtgaaagacttcgccaaatgcttcaagttctacaccgaacaactcggattagagccatcctggggagatgaaaatagcggatatgccaattttaaagtagctgacgggatagaaggcttcaccctttttgtatccgactggatggcacctgcggtaggcaatgcagataagcaacagcccgttgcgatgcgtgagaaattaatggtttcattcagtgtagataacctcgacgaaacttttgccgatctaaaagcaaaaggcgtgacgtttatcaccgaacctacggatatgcccgattgggggatgcgtaccctatacctgcgcgatcccgaagaaaacctgatagaactctttacccctctagcaccggagcaatgtagccaggagctcctcgaagaagataagaaatttcaataagaaagtttgttataaagaaatgtgcccatacgagtgagccggaaaaatgatagttaatgagccctatagtgacatcgctatggggctcatacattaacttgatattgcagatattcacttgcctttcaactttatagcaagaaactcacaaagtagaatatgaatctgattaataagccctcaacccataatcgaatctcatcttcttgctatctttcacttcaattttcaacaaattacttccttttcgcaagtaacggctgtaatcgctgatattgtattgattatattgcctggtctgctttgcctcctgcgcaaagacttccactccattcagccatacttttgcttctccggcaacattcagccataaagacagatgactgaaatccttatccaccttaaaagtagcttctgatactaccgtagaacgagggggacagtcgaaaggcaaagaagtcattttcagctcctgaccgttcagactgacaaggcgggtattcttgcttccgttctgactgtctgcaatcaaagtaacagctttcgcaggggtgatttcatacaaacggttgtgcatcaggtgtaacaagccttccggtattttagttactttccggtcgtaagtaatcaggccgtttacttctccctccacatctgtggtttgtgtataaacagccgcactcaacccttgggcaatcagcgtttccaaatcatataccagacggccgtaactatcaatcagagccattgctccgtctatattcttatacccccagttcctcatattcggattccagatatgttccttgatcgcccagccatagccgccgaattctcccagtacggaaatgcggttgccgttgttctccggcagaatcatggaagtgacaggataattatgtacgtcgtacatatcgcctacgcctctgtccgtccagccggtcactccgtttatcaggcgtgtatcgtcgtattttatcactttatttacgatttccaccgtgttatgctgtccccatccttcattgaaaaccacccaggtagtgatacagggatagaaacggagacggtcaatcatctcgaacatttctttttgccattggcgggtgtgttcttcgggagcgttccaatcagtagtagccaacggattgacgtgttcctccttcttccttgacgtagcaaaaccggaaaccatgtcttgccacatcatcaatcccagagaatcggcgtaataataatattgctccagttctactttgatatgtttacggatcatattgaatcccatctttttcaattgcaccatgtcccacaacatcgcttcctcggaaggaggagtcaacaatccgtcgggccaccagccttgatccaatggaccgtattggaagatgggttggttattcaggcaaatacggttatatccgcactcatctttacggacatctacttttctcaaggcaaagtaactctttacccggtctaaaacacgtcctccattggataagacaatatttagatgatacagtttcggagattcgggagaccataagacagcgttcggaacgtctatctccatcgcattactcaacttctgttccaccgtcttgattactttgccatcatccaacacttctattttcacttcttcattgcctttggctccgattatatcgaaagccagcttcacggattttctctcaatatcagtggaaggaagtacctgacgaatataggttttattcaccgcttccagccacacagtttgccaaatgcccgatacaggcgtgtaccagataccttcctggttaagttgctgttttcctcgggagatagactccgtgtccgtcgggtcggtgacggctacttcaatgctttgaggaccactcttcttcaggtatttagtaatatcaaacgagaacgggttgtttcctcctttatgcgtaccgaccaaccggttattcacccatacttgacattcataatccactgctccgaaatgcaggatagcagatttattcttccaggaaggatctaaggagaactcacgttgataccatagtttatccgtaggaagaaatgttttctgcactccggacagagatgattcaatcgcaaacgggaccaagatttccccttcaaaggaaacattcttccgaggcgtgttctgatccgttacggcatacttccacaatccgttcagattgatccattctgcccgttgcaactgtggtctgggataactttgccacacattttccggcgtcacctgttcagcccatactgttttaattttatctcctttaggctcccatgcatgggtaaacacctgcgacatggctcctaaagccagagttagtaagattctcttatccataagcattagcgggttttatattctttaaaatctttccgtcgattcttattgtaggtattccacattttctggaaatacagtacatcactcttgtccgcccattcgaaataggctgtttccaattcttttgccatttcaggatatttaccgatcaggttgtgctgttcggtacggtcttccttgatgttgtacaattcccattcatctcccttgaagttggcggaaaccagcttccagtcacctttacgcaccatgcggttgccttcatgctcggcataaatatatctttcgggcatcttctttcctttcacaatcggaaggatagactgacctgccgtaggcagaatcgctcttccctgatattctttcggataagtggctcctgccagttccacacaggtagacatgatatcggagaattgtgcaggctgatgattcagtccgcctttgttcttcacatgattaccccaggaaatgatacacggagtggaaatacctccttcgtgtgcataatgtttatagagcgtgaacggcgtgcagcagacatttgcccagcctgtaccgtaatgatgataggttccgggcaaacccatctggtcgagttcttctccggtatgggtatggtattcgactccggtctgtttgtcgaagccaaattcgtgccattcggcacaagctccgttatcggacataaacatgataaacgtattgtccaactcaccgtttttcttcaattcatccactacccggccgatgttcgcgtccatcacatctaccatagcggcaaaaatggacatacggcgtgcgaggtcggtctgctgatctttcgtcaatgaatcccatgccggtagcggatgcgtttcatcttcaaacagactttcgggaactacaccacgcggactaagtgccggctttccctgcataagtttcaggtccacaatccgtttccagcgggcgtcacgaatcttgtcccatccctgcatatagagagacatatatttatcggtcacttctttcggtgcgtgcaaagggaaatggggagcgttataggccagatacaggaacaacggtttcttctcctgatgtgcctggtcgataaagtcaatcgcataatccgttatcacattggtagcgtagaaagttccttcctcatagtgtctgggcgtacggtctttcggcaaacgggtatatactgccggattccagaaagagttgaatccgcccaacaaaccgtaatactcctggaaaccacgaagaataggattcgacttattccccaaatgccactttcctgacatagccgtaaaatatccggcatctttcaggacttctgcaatcgtgacgttgtccgaattggaacggaaaccggaatatcctttcggccaggcaggatgactgccgtccatgtgtcccaatcccgtctgatgcggataaagtcccgtcaacaggttggcacgcgacgggcaactacgggcactgttgtacatctgcgtcatacggacgccattctttgccagtttatccagtactggtgtatgaatctcaccaccgaaacagccgagatcggagaagcccaaatcgtctgccagtatgataataatattcggtttgtcctgcgcatacgtcatcgggaccagagccaggctgcctgctatcaataaagaagttttcatttggtattataattaaagttgggtttgaatttaccattctcatagatcatcggaattaatccgggacggcacgtcactttatattccgccgcctgtgccccacgcggattgaagaacatggtagcccaccagtttccatccttatcctggaaaagattgttgtgtcctcctcccgtgatggcattgtagcgttcgctatagggaccatacacattatcggctgtcgagatgatgcagtcgtaactataacgtgtcttcggcgaggttactccctttttctcgatataggtatctccctccgacgtacggtgcgaccatatagcctgtacgaggtgatatttgttatcatatttgaagataaacgctccttcaatatacggttccggattatattttttctctttcaatgttttcagttcctcggcaaatccgctcatatccggtttcatacgggcgatataatggttgtgcccgacaaagtagacagtgccgtccgtatcttcgaacaaacttccgtcgatattcgggaagatggctttgtctttattaccttcgatattctcgtacggtccttccggctttccggtcttgctccgcaaaatgaaagaacctctcccacctgccgactcattcatgcaggcaacgataaaccagttcttcgcgcttttgatataatgcatttccggagcccacactgcatggaagcggttgtccatcggatcaccgttgatggatttcttctgatatttctctcctgctttatatactttcggctttttttgccaggttccgtctttttccatcgaccatatttgtcctctggcttcccaagacttcatatctttggaacgccacaggtacaaaccgtcgttccagtcccagcaatgtctctgtcccggaaagtaacggtcgggggtagaggtcgttcctgtgatataataataaccgtcgggacccagcgtagcccaagtgtccctcatccaataatcaaatgccggctttacagatgtcggaacacgtagttccggagcgtttgtatctgccgttccatataactgtgctgatgctgtagagatggaaataaatcctgtaaacaagatcaatcctaatcgcaaaatcaatttcatatatttctgttttatgtttacggatacaaaaataggccgttgcggggcagacttcatggaatcatgtttttaatatccgtaggtatgtacaatcttcttattttttagtgttccgggtggagataattaaatggattctgtttaaaatggtaacgtctttgcgggagaggcagcgggtcctgcaaacgcaactcccatgccagtaaacgggtcagaagctctgtttgaatttcgctgtatttcctctcgccaaacagattatgaacttccgaaggatctttctttaaattatagagttctccgttgccataatgattcataaccagtttccagtcatcctttcttatcatgcgtgaggtaccgctttgcgtccaggtgttcagttcgtcgaagtgggctattttgccgggagtcagtgctccttcctgttcaaaagtcaaggaggcatccagtccgacatcggctcctccgaagccttgttgtacgaccatgctggagaattcttctttagggtaagcttttccggtcagcatcggccacaagctacgaccctgaactcctgccggtatttcggcaccgatggcagagcagaaggtggggaaaaggtcggctatcgatacgtggctatccataggggcaggctggttcttgatgtgatatcctgcccataccatcgggatacgtgcgaggctttcggaaagtccggctcctttacggatcaatccgtattccccccagtagtcaccgtggtcggagagtacgacaaagatggtgttttcatattgtccgctggctttcaatgattcgatcagtctcttgatctgatcgtctatcaaccggatcattccgatatagttggcacggattcgaggcatgtcttgttccaggttcgggcaggacgcgtcttccagttgcgccagaatacggtatttctctcctttctttgccaaatctttgcgggaggtctttaagatgggaagcttatcgggggagaacatggagtaatagggttcacatacctgataagggttgtgaggttccggaaaagagacccatacgaagaaaggattttctttctgctgtttaatccatgccagtgcttcgttcacgattttggtgggatgctgttcttccagcgagatgggagatggctccaaccattgccccctggcttgctgattcaagaaacgggcagtctctttctctgcgggagtcgtctttttgtgctttccccagtgtccgtattcagaccagaaatccaagtcggcaggtttcaggtaagcgtgattcttgccaaccaatgctgttttatatccgttttctttcaatacgcccactaagtcctgttgataggagatgtcggggatattgtgattcgtgcgtacgtgagtggcggaaggaaaacgcccggtgaacatggaacaacgtgccggagagctggccggcatcacagtgtatgccttattgaaccatacattctcctgcgccaaacggtcgacaaagggagtcacttccagcggaaaaccttccctgccgcacaaatcggcacgctgctgatcggtcataataaccacaatattcggtttgccggtttgcgcctggactgacatagccaaaccttgtatggcaagtcctgtgatacaaaagattgttttcattttatttatttcttatttaaaagatcctatttaaaacgatatacaaccatggaagcggcctccagttcgaacggttgattcaggtccagcccgacttccgtctctaccggttggacttcattcggagcaaacggtgtgttttcttttcccggaaccagtaccaggcttgttttatgtgccttgatgggacgtttgaagccggaaacttccggttgtagagtgacttttttatcctgcaggtttatcagtttcaggatatattgtttgctggccgtatcatatcccatcgtaacaaagatgttctgcaaaccttctatatccttgatcgctgcatccagacacacgtcaaacgtgttatccctgaacatctttgccagatagaagaaggaagtctttacgctactgtctactccattaatcaacatcggcaggaagatacggtgttccagaaagtcccaatgcctcatcaccggacgttcagcaaacaagggattcaaatcgccgttgcgttctattgacatacggatggctccggtagccagcaggttataaggatattttccgttgattcccaattcgccgataaatagatcggcaacaccccgtttgtagttatcaaaacgataatgctgttcgcaagcccattcgattgagttataataatgttcgtcgaacactttcacattcttcgggttgacaaaattgggaatatccttccgtttgtcatcattctctcttccgactacacggatgacactattggctatataaatcaagtcaggatatttggcggacaacgcctgatagattttctcataacgctcccaatacacaggtccgaaatcttcatttccaatctcgatatattttagcgggaaaggagcgggatgaccgttctttgcccgttcagctccccatttcgtagttgtatcaccaatggcatactcgatggcatccaacgcatcctggatataagcgtccagatcgacatcaatgtgtctgaaattccactgtggactttgcttcacccaaccactgcaaatcatacccgtaggcatcacatacatcgcatcagctcccacatattcgcacaattcataaaactcatgatagccgattccgtcggtacggtaataaggcgcccatttgctccactgtcccggacgattttcaatcggtccgagcgtctttttccagtgatacatcgtttcttcattgactccgtgcacgatgcatccgcccgggaaacggataaagctgggagaaaactctttcaggttctgaacaatgtctttacggaatacggattttccatcgttccaggtatcggacgggaacagggaaacgacatctatctgaaattgccctttcgacatcggttgtatggcaaacattccacgccggacgttcttttccggtttcagttcaccggtatattttgtccagtcccgattccctacattcacttcgatcacattgctcacccgttgtccccattcgtcaactagaaatacacgtaacggagcggaataattcctgttcttcagaaacaaggaaagacggtaagacgtatctgtcttcaggttcattccataatatccacggttgagaatcagggcatccggatggttcgcaatatcttccgtgacattaaccagcatcgaatacttattttccccgctcatcggattttcatccgtgcgactgataaatacaggagtatatgataacggataagtcgtccatccaatcagcggatcggcctgaaacacttttttctctttaacgcggggagccggaacattttcataaagaccgttcttcacagataatccggcaggcggtgtagcttcttcaaacgaacggttacgtatcagttcggcgtgcagggcaccctcgcccatcattcctatttcttcataatggaaaccgtactttacgggagccactttgtgggttttcgatttattgatatacaacgttccatcggaagaagacggagaggaactattcccatataccagaggtaatgtgaaaaacagaccgataccaaacgtaaaggatttgaatgtcgaatgattcatagcatttgtttttagagtttcacattgcaaatgtggtcttttctatccaagaaaaacagaaaaataatgcttaatacctgcaatcatgtataaaaatctgtagcgaagcggcaaactgaacatgagtgctgcccgtttgaacaattctacgactgttcaaaacaaaaaaagacgtatctttaggtcgtgaaaatcaatcagaaaagccatgagaaccaccttacttaaattcgtgctcttatttagtctcgtgctcttaaatacaagcttgtcgacgggacagattcaatataataatatacgcttcaaacagctaagtatagctgaaggactcccgcataatacgatcaatgcaatcacccaggacaaccacgggttcatctggtttggtacacgcaacggattgtgccgatatgacggttataatatcaacctgttcgcacataatgaggccgacagcacctcactccgccacaatttcatcacacgcttatataacgattcgctccgtaacattctatggatctctaccgatcagggcatctgcagctataactacgagacagaagatttcagccgttaccagattaaagggaacactaaggatgatgtttgtttcctgaacaccagcgatggtatgcttctggcagcttgtagcaacggactctatcgctacaatgaacaagacagcttgttcgttccttttcttctcgatgaagaaaaacctcatgtgagataccttgcggaggacggagacaaaaccttatggatagacaccaacaaaggactgatgcgatacagtctggagaagaaacagttcgtttccctcccgactctcatccagccttttacacagcaatgcaacaatgctgtcctgatctcgtccaaccagcttttatttaatactaacaacgattttttcgtctatcatatacaaagcaataccctgtgtaatctttcgaaagaccttgaagtgaaagacttccggtgtgcggcaaccgaccatacggggaatatatgggtaggcacggagtatggcatctttgtcttcaacaaactctatcaactgattgcacattacgagcaatcggaacgggatttaagtgcgctgaacgattctcccatttacagcctttatcaggacaaggctcataatatgtgggtaggaacctatttcggaggagtcaactattatatattcggttccgaccagttccagatatatccatacggagccagtttcaatcatttgagcggaaaggctgtccgccagattatcaatgctccggacaacggtctgtacatcgccaccgaagatggcggattgaactacctggacaataagaaggaaatcacccgtgccgaacggctgcacaagcaaatgcaaatctacgccaagaacatacattctttatggctcgacaaagataacagcttgtggctcggactgttcctgaaaggagctcttcactatataccgcatctaaaccgcacggtggactataatctattgtcggatgaggtttcttccggcttctgcatcatcgaagacaagaacgatcatatctggtacggaggcccttccggcttattcctgatcaacaggaagaaagcaaactcccgcccggaaaaaatttcatctctccgtgtctttaacctggtacagtttaatgacagtatactttgggcaggaacccgaaaaggcagtatatttcagatcaatacccatacactgaaagtaacctcgctccctatcctgccgcacaccaatctctacatcacctatatctaccccgattcacatcaacggatatggataggtacagacaacaacgggctttatgtatcagaccgcaacggtaacattatcgccttttacagtaaagaacagttgggatccaacgccatcaaaggtatcattgaagatgagatgagtaatgtttgggtaggtaccggaaacggactttgttgtatcaattcccaaacaggaagcattgaccgatataccacggccgacggattacccatcaaccagttcaactactcctccgcctgcaagaagcctgacggagaattgtatttcggaactatcaacggtatgatttctttctacccggaacaggtacgctccgtcaatccccgtttcaacattgcactgactgccatttggagcaacagcgaatatatgtcgcccaacaatgagaaagcattcatcccttcctctatctccgaactgacagagatcaccctgacgcacgaacaagcccaatccctgcgtctcgaatattccggcctgaattatcaatataccgacaacactcaatatgcgatgaaaatggaaggtatcgacaaggactggcagtttgtaggcaaccagcatcaggtacgcttctccaatctgccttcaggaagatatatcttaaagatcaaagccagcaaagatggtatccactgggacgaaacgggccaaaaggaccttgccatcagagtccttcctccttggtggctctcaccgggagcatatttagtttatgcactactcttcctattaatcatttacgccgcatacagatataccaaaacgcgtatcatcctgctcatgcgactgaaaacggagcatgaacaacgcgtcaacatagagaatatgaatcaacagaagatcaatttcttcacttacatctcccatgacctgaaaacaccgctgaccctgattctatcgcctctgcaacgattgatccagcagccacaaatcagcaacaacgataaagagaaactggaagtcatctaccgaaacgccaaccggatgaattatctgattaatgaactattgacgttcagtaaaatcgagatgaaacagatgcgtatcagcgtccggaagggagacatcatgcactttctggaagaactgtcgcacatcttcgacattgtagccggggaacgggaaattgacttcatcgtcaatctggaagacaccgaagaggaagtctggttctcgccttccaaactggaacggattctttataacttgctctcaaacgcatttaaatatacccaacccggcggatacgtcaagttgagtgccaaactaataaaagaagagaaaggaacatttgtgcaaatctccgtcaaagacaatggcagggggattcctaaagaagctcaagaacaaatatttgaaagttactaccaagttgagaagcgcgaccatcgcgagggattcggactgggattatcgcttacgcgttcgctcatacacatgcacaaaggggaaatccgggtagaaagcgaaatcaacaaaggttcggattttatcgttaccctgaatgtatccgaggatgcttacaaccccgatgaacgctcgtccgagaacatcacgaccgaagaaatacagaaatataaccagcgaatcaaggaaaccatcgaactcattcccgaaaagctgaccaacaaagaaaaagatcctgcccgggaatctattatgattgtggaggacaacaaagaaatgaatgattacctcgccagtatattcagcgagaaatatgatattatacgagcgtataatggtgcagaagcctgcaagaagatagccaaacagctgcccaacctcattatatcggatttaatgatgccggtgatggacggcctggaattcacggaacgtgtcaaacaggacgtaacgaccagccatatccccgttatcctcctgactgcaaagactgatgaaaacgaccatacggaaggttatctgcgaggagccgatgcatatatcaccaaacctttcaacgccaagaatctggaactgctggtacagaatatccaaaagagccggaaacagagtattgaacacttcaaacaggcagaagaactgaacatcaagcaaataaccaacaacccgcgggatgaaatattcatgaaagaactgatggaactgattatggcgaacctcaccaaggaagacttcggagtaacggaaatcacagcccatctccgcatcagccgcagcctgttgcacatgaagctgaaatcactcaccggatgctccatcactcaattcatacggaccatcaagatgaaagaggctaaaactcatttactgaatggtatgaatgtctctgaagcatcatttgccgtcggtatatcagatccgaactactttacaaagtgtttcaagaaagaatttaatatcactccgacagagtttctcaagcagttgaagtagaagttaccatgatagaaattcgatctatccttagacagcgtatcagctattagtagaaaagtccttttgctccctttgcaaagatctcttcccttaatagtaaagttgtctttgccctattccaaactataaatgcaagttccgtttataaaattgcaagctttgtttttataaacggaacttgcatttataaaaacaaagcttgcatttatagtttgaaacgaaggaagacgaagttatctaaccggaaaaaggaagtttggtctatatcaaagaaaagttatctattaataaccaacaggccaaataggtatatcctgtacatccgtcatttgcttgttaaaaattacatagattcagaggtatctatccttacaattcggaaacctacattggcataaccttgcgcacctgtccttacatcatctgatttctcgctacggcaatcgtcacgcttggagtcccaacttccacctttgacaatatactgcccgttagcatcagttgaagtagtccactcccagcagtttccccaaaagtcaatgcctccacatgcacctgtggactgtttgtaagcatccactgctgtcagtcctgattcaatgtggttagcattcattgccacatctttaggcatgtgaccagcaccaagaatccattcttcttcactgggcagacggtaagtatgcttgctgtcctgtgctgtcaaccatttgcaataagctttggcatcattcatcgtaatgttcacaaccggatagttgtcctgtcctttttcataggtaaatccggacttgaaggcggcatactcggcattggagacaggtgcatagccgatataagcattgggagctgatgcgccacgcaacaccatccaggcatctttcggattctcgtcccttcgagggtcgatgaagcgaagaaattgctgttggatgcgggtttctcgattctgcaccatttcgcccacaataccttgcatgtgttccacaatgctgtaagtccgggcttcacgttccagttcacggagcttgtttttctttctggctaccactttgtcataccgtacacacatctgatccaacagcgcttgtttgttggcttccgtaggtttcttacggtattgaacaaatagattgtgtgtcttggaatccatcttggggcgtccttcctctacgagtggagcgccgggcttgtcgaactccagctcgctctctaccaaatcatcaggactgataaattctcccaattccaccttctgatgcacaccgaaataatgcgccacgagtccgtctcggtaaatagagagcctgtatcctccgtaaaggttgcaaggtaaggtggaaatgtagtagtcttttccgggtataaatccggatttgctgcttgaactgtacgttataatggcacttgtatgtaccatatcatcgattgcagtttttccctgggcggtcttttgggtagtcgccgtgcctgcaagcggaaagccatcgacactttccagttctacctttgtcacacctataagctggaaattgaatttgataccgcatcggctagccgaatgaccctcatatccatcctctttatccgtttggtgggttgaaaccacgattttatcttctttgtcatcgtcttgcgcggacacagcagtacccgtcacaatggcaatagccattgctaaaaatatttttttcatatccgtatgttattagggaattaaatgaaatctgttcttacgactctgaaaccgacattggtatatccttgtgtaccaattcttaccacatccgatttttcactacggcaatcgtcacgttcagaatcccaactgccgcctttgatgatgtattgtccatttgcatccatggatgaagtccattcccagcagttgccccagaagtcgataccaccacaagcacccgttgtctggctgtaagcatctaccgctgtcagtcccgtctccacacgacctgcgttcatcgtaacatccttcggcatgtgtccggctccaagaatccattcctcgtcggtcggcaaacggtagttatgcgaattgtcttttgccataagccaatcgcaataagccgtggcttcagctatggttatatttactaccggataattgtcctgtccttcattataggtgaagtcttctttaaaggcagcatattctgcattggttaccggtgcatagccgatgtaggcattgggagctgacgcacctcgcagcaccatccatgcgtcattgggattgtcatcgtttcgaggatcgatgagtcgcagaaactgctgttcgagtcggatgtctcgattctcaaccatctcatccacaatctcctgcatttcttccaccacatccggggtcaaagcttctctctccagctcgcggagcttggctttctttcgagccactaccttgtcgtaacgaattcccatctgatctaataatgcctgcttgttttcttccgtttggttctgttggtattgacggagaaggagtgtagttgtggcatccagttccggacgctcttcttctacgagcggcgcatccgggtcgtcaaattccagttcgctttctgccaaatcaccggggcttatgaatgtgcccagttctacagtctgatgcactccgaaatagtgggcaaccagtccgtccttgtaaatggaaagccggtatcctccgtagaggtcgcaaggcaaggtgaaaatagagtagtcttttcctggagtgaaaccgttttcatcgggagcattaaaaaccaaaatggaactggcattttccgcttcgccgataaccggctgtcccgtctcgtcccattggatgccaacagttccggacaaggcataaccgtctacactttccagttctatcttggttactcccgacagttgaaagtttagctttaagccactgtagagcttgtgaagttccagtgaattaaggcagtttactattgaaaaacctttttcatcatatccatcatttcctgccttttgttcagcaagaacagttatggcaggattttcatcactaaaattcagttcctcttcgtttaccaggttttcattatcacacgaagttagggtaaacatcacaagaaacgataaacaaaatatgctaaatgcttttaatctcataatcttcaattatttatggtttcctttattttgagagcgatgaaacaggcgattcatcatctttctttccaattcatatactctctcaatttgtttgggtgtcaaaaatttgctatatttcaaataataccttttccttaggtcaagtatcttttgactatgagtgaatctttcattcatcgcctgttcagcttctttatccgaaagatgggaagagtctcttttaggacggggacccaatgcccaaatatctttctggaattggcagaaagtttctacaaactgcttggttgtcgtatcatccatcgccatctcattggcaataaaatgagcttgggcttcagccaactgttcccgagtcatacgctgtcgttcgctcttctgggcataagtactcacattaaaagtaatcattgctactgcaagtacaagaactttaatcatattcttcatgtctgtttgttttttattcgttcataaacaaatcgttctgataggttgcaaacaagtaatcctgatcactactactcaaattggcaaacgccttttcaacatcttcaaaattagtccttggatgatggggcaataggttgaagacaattaatagtgcaatacttgctgccacaagtcctcccgttacagaataccaaagacgaaagttgcgtttgggtccggaaggctgcatctcctgttttacagtttcccatacgttgttttctatatcatccaagaaactatcgggtgtggtatagggcagacgcttacctatgcggttgaaatcaaaatcttctttcatacatctaattgtttgaattcatatatttaataatcttatctttggcaatatgataactggactttacaccatctgctgttgaaccgatgattccggcaatctcgtcatatcccaaatcgtcatagtatcgtaagttaaaagccaactgttgcttagttggcaacgttaaaatagctttttgtagtttcacgacttccaaatcgctgtagtctacatattcgtcagctatcagactgtttaactcgtctacagagtcattcaacgatacccgatcgtctcgataccggtttagaagacgcaaggcttcgttggtggcaatccggtatacccaggatcggaaagaacattcgcccttaaaatcagacagcgaccggaatatccttacaaaagtttcttgcgttgcgtcttgtgcgtcctcatgaaccactaccaatcttcggatatgccaataaactgcatccttatactttgccatcagacaacgaaatcctttttccggttctttagctgctatcatcaccagttcccggtcatcctttattttcataaacagcaggttttgacaccacccaagattcggcaggaagaaagttatacaaggtcgtatcggctatccgttgcgtaacgacaaaacaatgtttgcgatggtgatggcggtgggaccggcgcacggtcacacatgattgcagcaaaaacataacggccattcctaaaatcagtaatttccaaatccgcttcatacactattgtctttttatatacactttctttttccctctgataataagttgcacaggcttttttttatccatagcgaaagcatcaagttcagcttctgctgcggccatgctaagtcccgtcatttttgcatattgcctgatgcctaggtgcttatgcgtttccaagtaagctatagccattgccaatcgttccttttgattgaaagggttgctgacataagatgtcacgtcaggtcgaaccacaacagtcaccacccgatcaggacgataataataatgccgatgccaatgttgtgcatttgcgactccacaaaccagcgccatcgcaactaccagtattcctgttttccattttatcgttgtacacatagtcatttatcttatctcgttatacattcatgttctacgtaccttttcgtgagctcatccgaatgtacgttctatataaaagaccttgcaaaagaataaaagtaaaatagaataagtgatttttttcatagaaataggaaaatctattctgtcataaggcagagccgcaagttaatttaagcggtataaacgccaacggaatatcggctgcaaataaaaacaacatcgccaggaactagctaacaaatgctgtaagctaattcactggcgataaaaactatatcaactaatacctattttaccactcctggaagcgtaaatcagcttccggattctgacgacgaatcagttcctcgtcaacctgataagtgacgccacctttcgtgtacttataagaaagggtaaacttaggctgtttccctacaaattccaatgattcggatgcaggatctaatgtggcggatgcatctgtgatagcaacacttcctccggcttcaatattgacgcttccatccggattgactgtcagattcaccgattcattgttttccaatgtgtttccgaaccccggtctgcgtactttgtttctacctaacgaaacaaagtcacgggtcatattctgactcaaatccttgttactatattcagtaacctgctgggtggacaaattggtaactttccctttcacaaagtatgtcccatgatactggctgacgaacttgacaactacaatactgtaatccttcaaattaccattcacatcagtacttatttcatcctgattatgatcgaccaaccggaaagggattgcatagtgcttgttcaaagcatcattgtcttcatagaaagcatcggaaaaagtcactttcacatctgctattgccagattcggattgctaatcgtcatcttgttcggattagccaactgataatagttttccggcattagtgtcaaacccgtaccatccagtaaagacggatcgatctcgaatgtagcccaatcatcggtatgcacctctcttttaccgccaatagccactcccacctttatcgacatatctgtatcggctaccaatgtccgcagaggtttttgcgaagcaaagtacacagaactcttatcgtagtccttttcataatcgtcataacaagcagtcatcagaacgcttatcagccctatccataatatatttagtcttttcattgtaaataagtatttatatcaacagcacgttattcccaaccctgattattcattagattcttattcttctccagctctgcatacggtaatggcatgaaatagtttttcacttcatatttccgttgttccactttctgtactttgaagctgaatgtaccatcttccttgcgggtaacggcaacaccctccacctcttcgttcaacggcaatacccaacgacgcatatcaaaataacgatgattctcgaaagtaaattccaagcgacgttcgttctgaatcagctttctgaacgagtctttactttgagccatttcatccagataaagatcaaagttgatacctccggcttgcgaacggattgttttcaatatttcgtatgcagaatacaggcatccttcggctttcaccgtcgggttgccccaagcctcattagcagcttcggcaaagttaagaagaacttccgattttcgtaacaaaggattgtaatgaaccgagtttaaggtctgaatcggattcagcatagccgatttcttggaaacgaatttagccaaataataacccgtacgtgtagcattctcactaaacgaaggagaatcttttccaccctcggacatatccaacggctggccggaatcgccaaatatagcactatgatagtagacattcagcgcaaagcgattatcgagtacggcataaagctgcgtcagatcgaaatcaggatcagacagatcgacaccggaacgaacatcggttgccggataaccattcttcgcataaaaagcctttaccagattatgagaaggagtggcacgggcacttccataatagaatggcgggaaatgaaggccttccagtagattactattaaaatatttgcggaaagcataatcggaactttcggtctgcacatcggcaatggaggaagccgtaacaggaacataagttccgaaaccttccatgcccagaatcttattgatctctttggccaccgcttcccattttgcctggtaaaccgtagggttcagaatttcgaattgtcccatgccggtgatcttcgtcacgtcatcatcctgcatggcaggacttgcgctatataaaagcgcacgacttttcagaacagctgccgccgctttcgtggcacggccgatttgtgtattaccaaactccaggtcatctccctgatacacattcggcaataactcgatggcattattcaaatcgttgacgataaaatcgactgttgcctgataagtaggacgaagaaattcaccgttctgcgcggcctcatcctgcgaaataaaatgatctgccaacggaatacccaacgcttttccattcttcgcctttccgccatacatcttcaatagctcaaaatgccaccatgcacgcaagaaatacgattcaccttccagacgcagcttgatttgcttgtccacttccggatcggtgcggttgtactgcacctggtcggtcaggccgttttcgaggaaggagtttacatagttcaacatgttgtacgcattactccagtttccgatcgggttgttaaacgccgtcatcccacccatatttaatttatagacagaagagctgcgcagattagtcactgcattatcggtagcacaatccagaaagttattgtcaaaacaatctggacggttggctatgccattataagctttatatagtacgccttgagcaagttccggaactctccaggtatcagagtctccgatctgccatgtcacctttgtatccaatgtgtcgtcacaagcacaaaagagaaacagacctgctaaaacgcaacttcctaatatatgtttcatattgccatctattaattgttcaaaattaaaatacaaaagagactccgcctgtaaaagtacgtgtcaccgggtagtttgtcacaccggcattcagcagttcaggatccagatctttcacggaagaaagcacaaacaagtttgcaccacgagcgaaaaccttcatcttcttcactaccgaacttggggagaactgattgaacgtgtagctcaattcaacattcttcatacggaagaagcttgtattcttcaaccagaaagaagaattgcggaaattgttctcaccggcagtggttgtcaggcgcggataacttccggtcggattgtttgccggatgataacggtctaatgccagtttggagtatttaccttctccattattccagtaataagcattcgttgcccaggtgtgaacgcccagttcggaatatccctgaagatacaatccccagcctttgtaacttacgttgaggtcaatgcccaatgtggtacgcgggaatgaatttccgagttcctttacgtcacgaccatcaatgatcttatcgccattcaggtctttgtaggcgatgtcgccttcctgataatcggcaaacgtctggggggcatgtccattgatggctacatctttgccaaataatccttcggcaaccagtcccatcatagcatcggtagaacgccccactgtgtaacggtattcttcaccatgcttcacctggttccatttcaatactttattcttagaccatacgaaattggctcctaccgaataagcccagtcgttgatacggtcgctccaagtgaacattccttctataccgtgattcaagacagagcccatgttgtcctggtaggtaaagttaccagtataatccccgtaagaggcatcaacagaaccaatgatgtccgtatgtttctcacggaaatagtttatttcggtatataagcggttattcaggaacaggccttccacaccaatgttccattctgctgccttttcccatttcaggttcggattgcccgcacggacaaaagtggaatagtaagccgtagcgccattgttcgttgttccgaaccggaagctgccgtcttgcgaccaggcacgttcatacaataaatgttccgtgcttctgtcatagcccaatataccggcgctggttttcagtttcagaaagttcacgtattcattgtctttcaggaaatcttcattgcttagaatccaggctaggccgcctgctgccgagaagaagtatttatctcccgatttgaaacggttgcttcccatcaatgccatgtcggcttccacagcatagcggtggtcatacatatagttcagacgcaatgcgtagtttgcattgatgatgtcttgggtcactccctgattcgttgttttcgagtacatgtaagtcagccgtgccgatacatcatgcttttggttgaatgtattctcgtatgcggcaaaggcattccaacccaatgtctgctgcaaggtagtcgacttccggctttgtgaagtggctacatctgttttcttcatctgggtgtacatgatctgttcctcaccggcaaagtcacgatatgttttgatggcatacgtcggatagactttgctcaaagagagttgtaggtaatcatagttgtcgaaagaaaggaaagcaccggctttcaagccttttgtcagcatatcaagatcgaatttcaaaccgatattggtctggctgcgtgtataacgctcatccgtatatcctccgtacatcgtttccgcgtatacattcatcggacgcagcagacttgcaccgaacaaaggaatcccgtccgagctggccagtccggtttcttctggtgacatagtcagcgggtattcattcggacgatgcgtagacagggccgtaaatacctgaccacagtccaattgcccccatttacgcatttccatacgtccggcaacgtctgcggatatagtcaggaaatccgttacattgaagtcgaggtttccgcgaagagtcaggcggtgcaattgcggagtataggtgacgtcttcaaatccgctacctcctacatatccggcaatcagggcataacgcactctgtcggtacctcccgtcatatcgaacgatactttccgatagttggcatttttgttcaataactgatcgtacaaatcgacgttcggatacaatagatcatcggctcctttggagtttttatatccttccagttgtttctgattatagtaaggagtcaatccgtcatttgcacgcgcttcattgtacagattagcatactgataagaattcagaaaatcaggagtacgcgtcatctgtaccacacctgcttcggcggttgcgttataaatgcggcggttggcctttcctctgcgggtagtcacccaaagtacgccattcgcagcacgtgccccataaagaatcttggcggtggcatctttcagcaactcgatacgttcgatttcttcaggaatcaaatccgctgccggacgttccacaccatcgatgataacgatagctgtattctccgacatgccatgctggccacggataaataaatcaggcgtattgttccccaatccgctgactgtggagcgaacttgcagacctaacattttaccttgcagcatattcgtcagcgtcaaatcagggaaggttccgaactgtccgttctccagtacgctcgttgcgcctacttcattccctttatacgtcttgccaccatcggctctattcaccagcgattcttcggtcagaaacagaggctctttcttcaatacaatcttttcaggcactatattgctgcccaacagtttatacactttatcttcatatcccaaagcctccaccataacggttgcgtcattctcgaccttcgtctgaaaacgtccctttgcatctgtatatagaacgactgcgccttctccacaaatgatagaaacattcttcaacgggctacctttctcgtcggtaacaatagaaactacttccaccaaaggcttcttcgccgactttctctttgatttattttgtgcgaaagtcaggctagagccaacgataaggacaaatatgagccctatcagtcttatatatctaatcttgtttctcatatacttttctttatttataggtatcaccatccggggttctgttgaagattatccaaagccgccacttcatccatcggcagcggataccaataattacgcttgttaaacgtccgcacggctgtcctcaccggaacatactcgtaagtaaagtcggtcaacttataagtgcaggctttttccactttcaactggtcggccgtataagaatgattgatcggagttgctttgacacccatgatcggatattcacccttaaacagttcttcagcaatcatccaacgacggatatcataccagcggtgtccttcgaacatcaattccacaccacgttcccgccgataagcttctctaaagtcaactccatccggtagttcgccaattccggctcttacacggattttattcaaagcctgacgggccgacatcgtacaacccgtaacgactgcatccggatcacctgtcgcctcgtatgaagcctctgccatatccagataaacttgcgaaacacgaatgtacacagccaccaaacgatataattggaaaccagcttcgccaaacaaaggcacacttgcttccggccaaatgaacttcttacacatatatccggtctgttgagagcctctcgtaaactgattggtagaaatgaagttctcggagtaaccgcccgaataagtagtcagataatagggaacaccctgtaaattcttcccccattgctcaccgggcacgaggatattattcgtgaagcgagggtctctatccgaataaggattggtagtctttaccgcatcataaccggaacgcggatcagtaatcggatagtagttgccgtcggctcccttacgttcgtacatatctaccgcattttgtgtcggagcattataaggagtaccttcggcaccggttttattatcgtatggttgtgtcagccattgcgctctgacgaaagcagaccagttgccatgatgccaacgcaggaaccataaatattccggctgtgcgaattgattggaattaggcattagctgaatactacgatattcgtcatgattcatcaggcgataatattcgtgactttcaatagcattgatcgccttttgcgcactacgggcagcttcagcagccatctcttttccatatcctttgttttcaatagaattcaagtcgttctgcatcaaagggctggcagcataaagctgtgtcatcgcttttaatgccatggcgcttactctgtcaggccgtccatgttcctcgtcaggccagcttataggtaaatattcaatggctttatccaggtctgtctgcatccaagcattggattcctgataagttttacggggaaagtcaaagtcgtccgatgctccccaaagctggtcaaagatgggcattccgccatatcgcttgataatctcaaaatagaagtaggcacgcagaaaatgagcctgtcccaacagttttctcctttggtcgtctgtgatggatttcacttgatctactccgctaattacacggttcacgatacgaagtccggtataagcacgagaaatagcacttttgaaattcttcccatcacttttacttcctatttcgaaacgtgtaccggcattctccagccagttacctgcattgacaaacttcgacggatcattatcgcgaacggatgcatattcatccgataaattacctaccgttacgtatgtattcgaataagagttgataccatgtgtaaagattaatatatcatcattttgaaagatgcggtccatgaaccctaacaaactgctataatctttataaacatcatcttcggaaagtccgtcatcgggagagcggtccagatagtcctcacaacttcctacaaacaaccccaatagaatgatccatatccaattcaacttatgtcttctcatatcagtaaatttaaagtgtctcataatcctaatctaaaaccaatgttataacgtctcaccaccggataaacattctgtcccgaatgttcggggtcacggcgggaatcacctttcgagaacgtcaacaaattggtaccgttgacatatacttgcagttttgtcagacgtaaaggctgcaaccaacgcttcggaatctgataattcacttccaggttcttcaagcgaagataagcatggttggtatatgtgtatgtactagccaccgaattataacttctctgaacatgaatactggggcgaatcggaccgccttgaatcggagcatcggctgtccatgtattcaacgtatttggttgagccttgatattaccttccgggaaatcccataaataggaaggaatcgcttctttataaacgtccatagcactgtaccacaacatattgaatccgattcctttgtaagaacctcccaatgtaaatccgagggtagtagtcggatagttcaggtttttcatcggaaccatatccttggcatcaatcataccgtctccattataatcgatgtagtacaagtctcccggaatcagcgtgttgtgtgtaccattggcaatagtggactgcgccgagttataaatatcatccaatgactggaagtttcctgttgccaggtatttgttcacatatccgattgactttccggcttttttcaaatattcgctctggttcttcggatcatcaataaaaacgacacgattctcactggttgcaaaattaaacttcgcgtaataattaaactttccaatatggtcgttccaggcaatatccagttcgagaccgtgatttttagtcttacccagattcacctgcggaaaagcaatgccactatcggcccatgacggaatcgtattacgtgtcatcaaaatgttattacgcttttcgtcgaacaaatccacagtaaagtttagtttaccccacaaacctatttcgataccaatattctgcttgatagattcttcccaggtagcatcggggtcggccagttttccttctttgtataaaggtccccagttactggtctgatatttaccaaactgcgcattggcagatagttgctcaaacttctgaatatagttgaaacgggtagcacctttatcattaccaactactccatacgaatagcgcactttcaggttggtcagtacacctttggtcaatttctttacccatggttcttcactgatacgccaaccaatagaggcagaggggaagaatccgaaacggcgtcccggagcaaatttttccgaaccagtgtaggcaccgttaaattcagcaagataacgctctttgaagttgtaagtgacacggcctacccagtcttcttcgtaagccgggaagttcatcacacccgaattagcagtattggtcgattcgttcatcttacggttaaacacaaataaggcgcttacatcgtgatcgccaaactggcgactataattcaatgctaattcgtaataaagtttacgtccgtaagccttgaaaccgtcataaacaccaccaacaggcaaatctccgggagcattttcatccggatagcgtttctcggtataattataagtaattgttccgtcagcattataaataggattggcgtaatcatacacacgattaatacgaatatgtgtacgttgggcaaccaaatcgtctttacctaaaattttacccggcatgatctgggtagtccatgaagaagaagtagtgtaagacaatgatgctttcaatgacagtccctttgtaataaagtccagcttctgattcaagattatatcgtagaaaccttgatgttgcttaatattacgactacctccttcgttcatcagacaggctatattttgatcggaacttaacccgtctccccatattccattactatatttaatcggaaattcattacttggagccgtaaagaacgttttaaaaaaacgttcatccggagaatcgacattctcataataagacggttggttctgataacccatcttaccggccacattgaacgaaagtttagtagtacttgtgatattgaagtcgaaattactacgccagttataacgacggtaagagaaggaaggatcgaaatcctcttgtttggtagtattaaaaatatctccgtcatgcaaataacccaaagatacgaaataactcattttcttcgtaccaccacgtacattaagattataagcctgttcataacctacattctttaccagttctttccaccagtccacttcgggaaagacatcattatacgggccgtaatttccggtagcatacgcattctcccatgcggcaatggtagattcgggaaccattgctccccaattaccatcattggcctgtgctctgttatactgtttcatagaggtcacatagtcagaccattcaggagcggcagaaggttgtttaaaaccaaagttagctgtgaatgatatttccggtttctgttcgagtccgcgtttggtagtcagcaggatcaccccattcgcacctttcacaccgtaaaccgcagttgccgaagcatctttcagtacggaaatagattcgatttcattcacatctacatcgttgaagtcacgttcgataccgtccaccaataccagtggatccgcttctccccaggtagacttaccacgaatcaataaagaagccttatcagctcccggctttgaggtggaattgatggcaaccacgcccggcatctgcccttgcaaagcttcggaaacggagttcacactacctatctttaataaatcatctccttttgccgtggcaatggaaccgacactggatacctttttctgtacgccgtatccaaccactaccacttcctccagtgtctccgtatcttctcccaaagagattacgcctaaagtcgttttattctttaaatccagttccagagttttataacccacataagaaatgacaagtatgtctcctttcgatgccttcacagtaaaattaccgtcaaaatcagtaatcgtaccgcttcccgtacctttcacgcgaacactgactccaatcatcggttcaccggatactgcatccttcacttgtcccttccaatagatttgttgtgcctgcacgtccagcgcacaaagcaaaaagcaacaaagacagaagaaagaaaaataaagtctgttccttttcataaacattatttttaactgttaacaaattctttatctcatagcacaaattaagcgggaaaatcttcaaatgaaagggaagaatctccttaaaacccgtacaaatgtgcaaaatagatttctctactacatttctgaacaaatcacttccacattggctttatgacatgctctttgtctacggtgatgttgtatacgccgtcatttcctttcttcaggatgagcggaacaatacgtgttttacgaggggacacggtggaatctgaacgatgaacgtggtaaacatagtaatattttccatccagccctttaaatacatctccatgtcctgatccgttttctcctacgagactgcgatgaatgatcggactgttcggatgctttttccacggaccgaaaggggaagaagcagtggcataacctaccgaatagtcgatattcataaaatgattggcagaatagaagaggtaatataccccgtcccacttcataacagtcggtccttccatcaccggtgcagacttatagttcggagtcttttcccaaggctccgtacagtccatacattgtttcaatgtttccggtttgatacttcctttctttatgtcaaactcggctacccaaaggtaattacctttattaaagcggacatgatataggtagtacttcccatcatcatccttaaataggaaagagtctatattcttagcggaagcgtctatcggcttgacttccttctgccggaaaggtccgaataccgattttgaggaagcaattactgtttgctcattagcggtataagtgaaataataagttcttttatccttaaagtattgaggtgcccagaagcctttttcaccatacgttcgatctcctttccgcagaatcagttgcagggaactgccatcaggcactgtccaatgctccagatcggtcgattcgaggatagcaaagccctgtggttcctgattgcgtgtgccggtgaggtaatactttccgttttccacataaattgtaggatcggcataagtgatctccttctcattaaccgaatcagcccgtaccccagtgacagacaaaccaatgattcctaatgcgagaataagtctttttgtcattttatgttttttcatacctattttattctatatctgatctttatctcatctacaaaatttcaatctaacatccaaaccaaaccgggtttctcccctgcgagattccatattgattcatcccaggaaagagccttggcagcatctatcggggtgctcatcgtagaaagaccattgtaacggtcggcaccaaagttttgtgctgcgtagttgggtatttgttcatctacgatagcaggcgtattggcagaaaaacgacattccatattcggattcgcatagcaattattagcctcatttttgttaaagcgtccgcaaattcttcccgacttaggtgcaccgttagagaataatttccggttccaagccacacaatgtgttacggtgattcctgtcgccttgttagcaaatcccagaataccgcctacctgattttgagcggaaatctcgcaatcggaataacaataagagatcacagctgtcggactaggatctacaaatccggcaataccacccgcaggattcgccactttcatcgggaaagcttgtgcaagacctgaagaataacactgcgtaacgatagaatataacatacgtccaacgatgcctcctacacatgattcagtcacaatatccccagtggaagagcattgagagatcgttgctccgcctctcgtttccccacaaataccgccggcgcaccatacggcagtaatatccgttgccgatgtacactgatgaattttactatctgcaccatgaagtcttgcacagataccaccagcctgaccgttatcccaggcagtcgctcccgttcccgaagttaaagaaatcgtaccggatacccgaacattctccacaatacccggagaagtagcagctcccacctgtccggcaaggatgcctgccatctttgtattggctgtaatctgcgcattttcaaagtttatattggaacacttaccaaccaacaatccaaagaatccctgattaacagaagaggaagtatttactttcagattacgaatcgtatgtccgcctccatccaatacaagttgtttggaaaccgaagtctctatcggttgccagtctacaccttgcaaatcaatatcattctctatcttggcatagatcgtcttaccatctttgagtttctctccgagagttatcaagtcgttcgttgtcgccacggtataagggttgtcgatttctccctgtttctgttgcaggaagaaagtcattgtacttttctcttgattgactgcaagatcgtcggaaaccagtttcaaaccgagaacgtatttctttgatccgtcaagcgtacctaaatcatggaagcgcaaatttaccatacgcaggacatcgtcccccttaaaattaaaattactcccatccagatcataatattccacaggtaagaggtgatattcttcaccaaactctttggcatcgacaacagccaatttcgcctttgcttctttttcgcaatggcttttctccaccataatgttatattggtattccggctcatccagatataaatcatatttgcctgtctgataaagcgacaaggtaatattggaataggtaacttcagccttttccggctgtgtcagatccatgacttcatcacatgatatcaacgaaaacaccattaatgacgctacaataggaatgtatcttttcataatatctttcttttaattattaaaaacagggattactataccgacgttatctcctgacaaccaaactttatctccatctatacgaactacttccatctccatcccttctttgaggaaagaaactccttggaatgagaattcagtctttatcttttgaccaacagccgtgggcttcccgtcaaacttcacatgaatgtatttgctttgatccgaattttgcaggcgataagtcaaccgtttaggattaattgcagcctgaagttgttcctgctctgtaaaagtacaaattccatccaaactataaaacccaacttcggtatatcctgttatattcttcttatcaaccccgttttcggcatattccgtctccgcacaagaggtgaaagtcaacaaacataccaacactacatatattactttcataagcgaataaatttaagataattactttctaatagttgtcgacaatatttctaccgatccatccttataagtcacttcagcggtaagtatttgtccgttcaggttcttattcactatattgatttcctgtccatccagctttactttataagatgagacatcatccggcaaatttaatagttgtaccaacatatatccatccacttgttgatatttcaacaaaggaaactttcctgttacagacttggtcttaacatcatccttccacaacacggcatcatccgatttcagcaatgctacatgataagtcgttccgggagcaagattttcaaccaatgtatagtcattctccgaatcaagcgatcgacgcaccacctctgttccctcctcatctgttactgacaatatacctgttttatcggctccattaccccaacttatgaacaattcccgttgtcctccgacaaggctggaaactgccaatccatcccgggcagcaataaaatcaggatataacaatggattgggattgtagaatccgtctgcatccagtcctaaataacgggaaaaataaattcctccaagttcccacatttcagtcttcgcatcgtaaacagctctcgctccaccgggaaccacactaaaacgtccggtaatggcatacgtatcatatttcttgaatacttcataaaaagtcttataccaattcttcggataccaggaataactctcaaaaaggctcttgaactcggttgcactcaccggtgtaccggcgttagctttttcggctatcagattaaggtattcgtaaattttcatcccggccgtataaccatgcttggttccccattctcccagtgcatccgccacatgaggatttaaagcacgcaccatagagaattccgtgcaaatcagtttctttgttacaccatatttatcgcggataatacggaaatcatcttccgcctggttgattttcaatgcgtgaacgtgcaagtcgagccctacaacattaggattgttattaaccacagagactactgcaggtaccgtttcgctcttcggcaactcggaaacacggttcaatgctccggcataaatatcaaatgtccagccattagcctgtttccaggtagtcagccgattggcaaactcattcagaaatgcccgataatcttcaccatccgcatgacagagatcggtatccaatgcattctcccattccggctcgttacccatgacaagtatttcaatattcttcgccatatcataggttttcagtaatatttccgttgcctgaaatatgtactccatctccttagttcctactttgggaaccgtatcggtatataattcaaaaggtattttcagactcaagatgaatttcacacggtcgcccaacgctttcttggcctgaataaatttcaatgtaggaatatgtgtcctgatggcattttctttcacaccaacaatcttcccgttttcattctgaagaaacagattggggatattgacaaatcctctcacccaactcactttcgactgtttcaacatctctatttccgtaatcgggtaatctatattttcattatagttcgcccccaaatcctgcgcctttgttcccatcgaacataagaacagcaatacaaacattaaaaaagctttcattttcatatacatacttcaaggttaattgtccgacatcgaacagaacaaaggtaaagaaataaatcccggtagaatagaacgattgttttatcaacgggatttatgttcagaataaacatttgaccttattttaatggttcttcttctacttcgctgcgataataaccgtccacttcagcaaagaaattctgcttcagggagtccagaagttcgggccgttgtgccgccatattctgttgttgagtccggtcggcttttacattaaataatccgtattcacccagattacccaattcatttccggtcaggtttcgttcggaacctttataaggaggcatcataatccagtcgcccgaacgataagccatacgtccttgcgcttccagcactacatccttgcgggcagtctgctcttttccgaagaaagcatccagatagttccgactatccaaaccttccggcaaatcggcatgtatcatcgaacccagagaagcgagaatatctacctgacaaaccagtgcatcggatacgaccggctgaatctttcctttccaataaacaaacagaggaatatgcgtaccaccgtcgaacaaactatatttacctccgcgcagacctcctgcaggaagatgatcgcctgccagttcgggagcaccgtctttgtaaccgtcattcagaaccggcccgttatcgctggagaagataatcagtgtcttttccaacaagccttctttcttcaagtgggcaagcagttcgccgacacaccagtctgcctcaacgatggcatcgccacgagaccccatcgttgttttgcccacaaatcgctggtggggagcacgaggtacgtgaggttcgtgtaagccataatacaggaagaaaggagcacctttgtgttcagtaacaaagttctttaccttatctacaaaatagtcggccatatcctcgtctttccaacgggctttctgtccgcctttcatatatccgatacggggaattccgtttactatagagttattgtgtccgtgtgcccactgcattttcagcatctccggatgagagatggcagtcggttcgccttcaaaattatgctcgtaacttacttcgatggggtcagccggatcgagtcctactacatcgccgttttccacgtaaaccgtcgggacacggtcgttggttgctgcaatcaggcaagaatagtcgaaaccgatttctttggcacccggtttgacggtttcgttccagttgacattgccgtctcccatccccaagtgccactttccgatagctccggtcacataaccgcattgctgcatcatcttcggcaaggtaaactgattttcattaatgataagaggagcatctcccggcaggatttttgcatccttatttttccacggatacattccggtcatcaaagcgtaacgactgggagtggaagttgccgaagtggcatatccgttcatgaaacaaactccgccatgagccagactgtcgatattcggagtatgaatcgtagtagagccgtaagcgctgacatcaccaaatcccagatcatcggcaagaatcacaatcacattcggcttttcttctacgcgctgtgaggtacaacctactaaagacaacgtaggaactagatagattatctttttcataatattatgtagttaataacgatgcaaatttagccaccacttatttatttatgtagaacaaatgtttaataatggggagaaatgtccatcctgcaactattccagagaaataaggtatgaaaatgcgtgtgatgaattaactcgaaatgatagcataggcctgtcaatgttctacttttaatattctacaggaaaatagccagttagaaagtagcaaactagaaaataaactgtataaataaacgcatgagcatacaaaaaacagtctaatattgcataaagccaaacaagatatacatctttctctattcaggaaccgttcattgccttaaaaccaacgaagtgttcctcggtgtgcatcgacttgttcctcaccgaggaagctatcgttccccggtgaagaagataaaaatggactattaagaaatattttctccctagtttatcataatatattggaaaagagaaaataataaaatgattggttattcaggtatctactctccaaataacaaaaagaatcaagaatctatcacaattcgattagtatattctcaaaacagcgaaaatagagaatcacgtaattacaaatgcatggcattttccggcttttctttaccaaactgcgatttatgtccttctccgatgattaaatattccttttttaagaatcatcgttttttaagggaggctatatagtttggaatagaggttgtgcttaacaataaaaactgtaatagtatacacaatagttcgttaagttttgaattaacaaataaaaagtaggtcaagtcctaccgattcattatattaaggttttcgacatctttaataatcatgaatctgaacgaacttgaccaatatttggagctaataaatagtgtgctgcttaaatcggcggtaaagataaacaaatggcgtgagaagtttatgcttgaagtgttacttttacatttgattatcccgggtcggattaatttccttcaactgggtcgttatggtcgctttggtgaacaacgctatcgtcagcagtttggtcgcaggttcgactggctgtcctttaatgccaacttggcaggatctcagataggtaatcgtgttgcgattgctttcgatccgagctatatcagcaaatcgggtaaatgtactccctaccttgggcgtttttggtcgggttgtgccaggatggctaaacgttgtttggaaatctccggcattggtctcattgatatggaccttcatacctgcttccatttggaggctgttcaaacaccaccggcaaaaacactggagcaagtcaaatacacattaatagactggtatttacatgtgctacgtacccgcaaagaaagacttctgcgactgacaaactatgtggttgcggatgcctacttctccaaatccacatttgtagatggtgtacttgaaatgggatttcatgtaatcagtcgatttagagatgatgcctatttccggtatctcaccacagaacagcctacaggtaaaagagggagactgccatcgacccaatcaaagcaatcctacctttcttcttcaaaggaagaagattatccgtatttttcagtagaacaaacgtttcgacagcaatctctcgtgccacagcacgatgagcggtcgtatacagctcgttttcaccacgcaacgtatcacaatatttatatgggtcgacaaacaagcccaatttatactttgtttccagcacacgcctacacgcagcattaatctgttcttctgccacttttccttccgctatagactcttccaacgtattcaggaaaccacaggaaaccatatccatatccgtacccgccagcaaagcacgcgcagcggcttctttcaaaggagcaactccgtgggcatccatcttgcccaacgcataataatctgtcatcaataatcctcgaaatcccactcatttcgaagcaaatcagtcagcaaccatctgttggcagtagccgggatagcatccacaacattaaaggaactcataatactgcctgcacctgcatcaacagcggcacgatagggagcaaggtattcattatacatacgcaaacggctcatatcaaccgtattataatcacgccctgattcacttgcaccataaagagcaaaatgtttcggttcttcttcaaatttggtggtagttttttcttcgttcatttggcaaattcagttagtgcctatattttcttatggaagtgagtcgaggagcaaaatgatcatcaatatcgcccatatatttgccatttatcccgaatgtgcctcgaagtgcataccgattcaaatgggggggggggtactaaagtataatgctcttggataccatcgtcaaaagtaaggctcactgcggcttggagatcaccccaaaaatcggctacacttacagtttgtgacttgatagaaaaagaaaaaagattgtcatgcagagaaactgcttatttcttgttaccaagtactccgttctacaatctgacataacactgatagtttttgttttttatgattagatacgaatcagtagttaaaagttaggtttcgatttacatttaactaccaattcacattaatgatttactttaaataatattctttagttaggacattaccagactcgtcaatccatgaaataacataatttcctctgaaaccacgaaattttatttgtctacagctgtcaacttttatcactcctttagtcttccactcgtgattgatcaattcattcaaagcatgatacgcttgtttgggtatcatgtctttggtgaatagcccggaaacaccggtctcatccactgctccacatccgtcgactacgttccaccatgtgatgcccatcattggctcaaggctaaaccacagtcgatacaaattccgggtaattacagcctgtattttctgtccacgtttattgttgttaggagaagtgatggttatttcactcaaatgaacaggcagtcctgtcgctgccaaacgatttatgacacttctcacttgttgaggagactgaatatgtttacccgcagcaatatccaagcattgttgtgggtcgaacaaatgcatttgagaaccaattacatcaattttggctccccgttttattaaatccctaacttgggaagcatattccggtcctgtccaataatcatttatatttagttgcaccccatccgggaaaagtgatgaagcttgtttgaaactgttataagtatagtcccccggcataatgccataacgggaactcaaacaaagcttactatttggatgcatcttacctttagcataatctaccgcactctcattcacgacatcccaactgccgatacgcccgccataatgtctggcaatttcctgcatacgtttcttaaacagttcttctaattttctggagaaccgcggtaatttggtttgtaattcatctggagatattttttgataattatcattgtatttctcctctccaaaataataatcatcagattcgacgtatgcagtcacgagcttgttaaattcttcacgttcctttcctgttaaatattttttaagtatccaattggggaaatgtgctttccgaagtccccagactaacggatgtccatggattgctatccctttggcgatacaaaaatcgacaataggatctgtagccggacgtcgccaatgtggttttgatttagggtcaccctgttggttccaatatatttctgtatcccaatactcttctttgaaccgcaatcgatccggctctgtttcaaacgctttccaataaaaaggaatagtagctcgattaaacaaaataccaaacaaatctttgtatttctgattatgctcttccgttcctaactgattgaagttaaatatactggctccgaatatgaaatcatgtgacacttgttcgattttcacttctgttccctcgtttacttccggcaattcaattgtggcgttcgcttttcgatattcttctatatctctatctatacacgcttgaacactgtcattccagatttcccaatataaatcactcattattttctctttatcttcgctggcatttttaggaaaatcactttgtgcatatatacctggcaggaagaataaaaagaagacaaacaaaataaaatttttcattattgcttacatattatgttaattaagagcataggctcggctgcctttatgctcttaaaatagtattgattatcattaattatattgtccgttcatcctaaaaggcattatccacaggagtaagaacaaatgagaattcataatccatatattttacatgatattgtgacaacggccacccaccccagctgtttacacatcctaatcccatttgtattttatcaatacaaagattagtcaggtcggcctttctcacctcggggaaatgcctttggtctttactccatccatcatctaaagactctatcgtataatgaagggcagaggccgagaacggagccccggctacaatttgcaaacctcgtcctgctacatttagttgcttccaccaacgaatgtctgtttttgtcccggtttcttgcggacgaatataaggataaggctgctctgtaacacattgatgatagattcccaagtcactactatgattccggtcacaataattttcaataggaccacggccataatattcaatcatttcaaaatcttccggcatttgcatttgcataccaaaacgaaataatggtggagtcttactttgcggattgaccgacatcctttgtgatacctttaaagctccctgattattgatgacataagtaagatttagtcgggcagagacattcttcatctcgtaatcggcatatatcattacctgctcatttcttgtttcccatttcaaagaatcaagctttataccagggttcttccatactgaaagtttgcgatgtagattagctcccatatcgttgtcagtaggggcacgccaaaagttaggggttaatgcagcaccctcatccatcaattccagacctgctacttcataacgagtcagataccctgtatgtttgctgaactccaaatgaaagttgtcaccgtttatatgcagataattcctgtcgttatcccggatttgtggaacttcaattattgtattgacagtctctacatttttcaattccagagcaggagccttatatgcattcagtacaagctgatctttagcgacaatatgtccggccggaagcagaccttcccgtttcttcaaacgataagccacattgagtaaccgttctccacatttactatcgcctaagtccaatgtgacttttgctttctgtccgggagcgacattcaatgtttctacaaatcctgtacgcacagtttcgccatccgccaatacagcccattccatataataggcagagaggtctcgaaagaagttttcgttatgaatgttgatttcacctttggttacattgcttagagtagtccatatgttttgataaaaatacccgacttcatgcatgtgaggattaggcgcacgatcagggctgaccaagccattgtcacagaaattattatctgaagcatcgtatttgctaaagtcacccccatagccataaataccctctccttctttgtttttccaatggcaggactgatctgcaaaatcccatataaatccaccttgtaaatgagggtgtttacggataagttcccaatattctttaaaccctcccattgaattacccatggcatgagcatattcacactgaatcatcggttttagcaaaccactacgtttagcgtatttttccatttgagcataatctgcatacatcgggcaatacacatctgtaaattcatttccgtctgcttgttcgtattgcacgggacgacttgtgtcttccgcctttatccaacgatacgcagcttcaaaattcggtccgaaacccgcttcgtttcctaatgaccagaagatgatacaaggatgattaaatccacgttgtacattgcgttggtttctttctaaatgagccttcttatagtccgcacgtttggctaatgttccatttcctctataatccatcccatgggactctatattagcctcagccactacataaagcccgtatttatcacacaaatcgtaccataaatttgcatccggataatgacaggtacgtacagcattaatattaaatttcttcattatctgtatatcctgtatcattcgttcctgtgacaccacagccccgtcgtccgggtctaattcgtgacgattgacccccttgaataataccggcttgccattgatcaaaatctgcccgttcttctgttctattttgcggaaaccgactttcacggggatcacttcattattctcttgcaaagtcgcaagcaacgtatagagataaggcgtttctgctgtccatttccgaggattctctacattcattacaacagtattgcttccttttactattccctttgctacagtccgtccggctatatcttgtaaatccagattaacggtaccattgcccttcaggctgattgacacatgcaaagcgccgtcctcatagttactatccaaatccggagtcacacgaatgtcattaatacgtttcttgttgcgggcgtacagatagcaatcgcgccctacaccgctatagcggaaaaaatcctggtcttccagatacgatccgtcacaccagcggaatacttgaaaggcaatcagattcttttgtccaggtttgaggaaaggagtaaggtcgaattccgcttccagcttactgtcttcactatatcctacatactttccatttacccataaatacatattagaagtgacagaaccgaaatgagcgatgatgtcttttcctttccaagaagttggaataatgaattcacggcgataggaacctatatgattattctcaacaggcaattgcggagggttgttttgaaactggttccgccaggcataaccgtgattaacataaatcgggactccgtagccgttcagttcccatactccaggtacttttaactcctgccagcccttgtcgttaaagtccgttttccaaaagtcgacaggacgagaagttgcatcttttacccagttgaatttccaaagtccattcaaactcatataattaacagacttctctttatgacctagtaaagctgtttcctctgattcgtatgcaaaataattggtatgcataaacgttcggttaacagcgtttacttccggattctgccattcgtcaaatgtttgggcgttagcattaattattcccaatgtaaatagacctataatataatttttattcattactgtatttccattttatttatattcgagccatgtcgttgcaacacatttactatctgtcctgaatctaatccagcgtgcctggacagctggagggaaatggtgtatgaatgactcaccgggcgcaatatcaaaatgcttgtactccatccaatgaccatcccctgtcgggtccatttctacgtaaaatctgaccggttggaaagatttgtgagaaatattcagaatacgctcatcataaaatcctatcaagtagggatcggaatactcgtctgcctcaatttgtgcatctacccatggtccaccgcttcccaccggttttcccagctcccacaggtcgtcaatggttccagcccaaagcgtgagttttttatcgtcagacaccaccatgcgtttattgccgcaatcattggcattcatacctgacagaatcaataagccacgataagaagcatagtcgttaattcgtaatttgtgggaagatatcggtcggatttttgcaaagccgtccgcattttcagctggtaattcataaaatgtgccatggcaattgaacaagtcacgttctgttgccacttcccgacaaattctcaatttgttttgctttgtcagagtggtaaactcattcttgcccaacggcaatctccagcgacgttccttgtcatctataatcaggacggatccgtctgatacaaccatttctccggcatttatttcaaaatttcttcggatatattctacagtctttatgtcatttttattttccagtttcatgtctccagaaagttcatagtatttttccccttctgacgttctcgctaaaatgcccaggcaacgacgattatcacccaggcaatataacgtcccttccgaaacgggcttttcgttcactcgggtgatgccctcaaaaatggcagcggaagatatagttcttttctcgttcatcgcaaaaacaaaagtggcgcttataacagacgtcttatctgtagatatacgaatccactctcctttatctttcggagtaaaagttactaaagaagagctcttcgggtctatactcttagagcataacacagtccactgtccatttccttgcacatctacctcaaaagtcaggcaaactttatctttgctatcattacgaacccatacacatctgttatcccaaccattaaacaaaaacggatcactcgtttgtccggcaactacagtgtcgttcatccaaacagaaccggatgcatttgtaggccccaattgatcaatacgttccggtgagacaaaccacaaattggaattagactgaccgggaccaccaatatttccttttatctttcgcttgttcaaaaaatctttctgtgccgtatcgtcacatccgaacacaatacggtcatgccaacgagtaaaatcaccgactactttcaagtaagatgaacgcgggaatatcccggacgtattatttatacaaaatgtttcgggaaaatgccaaaacataccatgcattgtcatcaaataatccggattatcctttgttcctatattccggatacgtggccattctgtgttccagccgtgtgcaccgtcataagaattgcttgctttaggaagccgaaagaatctccattctcctttttcccgtagagcaagaagtaatgatttataatcccagcctgtagcccaaaccggatctgtttccggatgtggattaccgtaaattccacctgggcctgttacttctgtaaactgattacggcgtattactttccagtcttttccgttccattccgccaaacatcctgcaggtatgttaaatttctccagtgcttcgtgggttgcttctccgttgttagagaaaaccaatactccttgtccactatacaaccccttaccatgtgcgccggggagcaagtcattagtcggattaatatctgtgtcatcatgcattcctccgttcacatccggataaagggtattcgcctttagtgtatttacatctatttcatagaatccttcctccatagtagcgatatacactttctccgccggattagataaatgacgtgcaacgccggtgtaacggccttgcgcttctttatatgagataacacgtacattacggttactgtctatagcgtaaggacctataaaaagttggttgctttcgctatgaattaatcggttggcagaggtccctcccacactttctgcacgtgcgcgaactccaagtgtgtctgtgatttcataaagtttgtcactggacccccatggtaaatgaggcccgtaagtaacaacccataacctgttttgccatggaacgattgctcctgtgccacactctccttcattattataatatgcaaggtgcgggtaaatcccgctataacagggtttgtgggagtctgtcacggagttctgcggacggcaggaaacaagaacgacaaacagcaacaacaggttgcctttgataagatatttattcattactatattattacatattacaaaatcaaatggtggacatgtatatccagtgtgctgaaactatacataacaatatactggacacatacatccaccaaatcaaaaataaaacctattaaaaactatgattgacctattcttctacccagaaatcaatactccacggtttcaccttggccgaaaggatagaactatctgtttgtcttcccaaatccaaatttaccccttctttattatatcggtgcccattaaaagaacgttctttatccaaggtaattttaaattcaaaccattcgtcagaacggttggtaacggctattacatatttaccatccggttttttccatgccataacgcggttattactccgctcctcatcctcctttatattatatcgccttgaatcccaaggcatatatttcaggaaaccggcaatagcattgtagttagaccattcataagtgaaatgcccgtgctttaaattgggataatcaagtcctctgttttcagcactcggacggtaaacgcccaaaccaaatccttccctgtctatctcacttatcggtttcaacgcatgcagccaataccatttcggcgactggataaaagtcatccaattcataatggattgtgctgtgtttaccattcgccactcacgtgtataatctttaacttgttctctaaagtattcaaattcattctgataaataggcttgccctgattgtttgccagataattctcacgacgcttcatcacattgtccgagttatcccctatacggtggtatacccaagcatctacatattgcaataattgtggattttccttccacaatttctcaccatacgttcccgcatttccactattggtgtcatagattatctctattgtattatctaatgcgcgaatctttggagcggccattccaaataccttcaccaattgatcttcggtatagtggcagtgtggataagtggggttagagtattgtgattcattttgcaacccccatgaagagatcttaaatccctgttctttcatgtatttcgcgtctttaaccaaagcatcggtaaattcctccagaaaattatcatcgttgtagtcctttaaggtaccgttattcagactgttgttatttttccaataaggagctggagaccaatactccatagagattccttccacaccggcatcattcatcagttgcaacaagctgtttacttgtccgggaaaacgttcctgaaagtttttccggtcatcactgattcctctgaaccaaattcccatagctacacgcatgtaacgaaatccggacagcatttcctctgccaaacgcgtacgttcggccggtgctaaatcccaaggaactccgaattcagggtcatcattttcatatcgttcactataattatcggattgaatttcaaatcccaatccttcaattacctgtccgggctggctggttagtaattgatagttaccactggacatctttgaaggaatttcatctttcttgtccgggtcgtcattttcatcagaaggctgcttctcatggtgatggtaagttttgtattcctccttgctacaacttgtcattgcgttaggaaacaagaatagccctattagaaatactaagcgtgcaatcatttgtctttttttcatgtctctttggctgttaatagttatcattttgtcccaaattcgggtttgtaataatctcctgtgagggtattggccaaagataattcttcgctgtgtcaaaattacgttgaacaattatcttgataagcccttcattgtacataggggtgaaatctgcaattccgtcttcatcgatttctggtgtatatgggaaaaaccatttatttttgttgacaactttatttatcagttcatccttgtcaagcaacccatagtttggtaaattcaagactttctctgccagcttccatcggataatgtccatataccttatactaccttcaaaagccagctccatacgtcgctcaattcgtactatttggcgcaacttgtcccgatcttgggtagtgactttggggtatcctgttgcagccgcgtagtcttttttgtaagcccgagctctaacctgattgatggcatccaacacagactggtcaatgtcattggcctcaatcttcgcttcggcataggtcagcagcacttctccataacgaataaacacaaaatcggggtctaccttgaatgttccgtcattaatccatagttcatccactccttttttcctgagcaaaccgttgtaagaagcatattggcttccggttttgcaatcaagattggtaatttcttttccggcaatagcactccagaccctgctgatgttaggattaggattatatattacacctacatgttcagttccaaattctacgattgtggcagtgcagcgcggatcgcgattcttgaaaggattttgtgggtcaaacaatggtgattcatcaatgggaagcccgtctgtacaaagaaaagagcagaatagttcccaagagggatattcggaagcatatccgccacggtttctagggcaatacgacatggctgcacctacgtccaagtagttttttagttctaccgaacgaggccaagaaagaatattctccttcgcatggtgtgtagaagctataaacaactcctcgaagtccggatgaagttcatatatctgtaaatccatacatttttttgctgcttgtgccgcaagttcccaatcttcattatacaatgcgtaacgggctttaatggcataagcggctcctttggttgcaaattcccgttgagtgccgtaagtctcgggcagataatgcgctgcttcatccaaatctttgtacacgttttccattacctcttcccgatcagttcgccccatttcaaacgcttcatcaatactgatctctttgtctatataaactacatctccgaagagagaagtaagtatggcatattgggtggcacggacaaaaagagtttgtgccctgtacaattgctttttttcttccgagatgcctacactgtttgcatcctcaagtttttctaacagaatattggcgcgtgcgatagccttgtatccattctgccaacgtttctttacctgatctgattctccattaattgttccacctgttataaaattcaaactggctctagactggttatcatcactccacggtgaataatctattgtactttcatttccatttaacgtgaagaacacagtacgatatagcccgccgatagaacgttggatttcatcttccgaactataccaggaatctcttgatcctgtgtccaacggatctaaatctaaattggcacaactgctccatagacatactgttgtaaagataaaaagaatatgataaacctttttcatattattcagttttaaaatttaatgttaatacctccaagtatggatctggtaataggatagaaatctttattatccgtaccaccgattacgtccgaactgttctccggatcccatcctttcggatatttgctgaagcacagaatatcgttggcactaagatagatgcgcagactcttaatactcaatttctctgtcaaatgcttggggacggtataaccgacagtgatatttttcaagcggaaataggcgccattgaacagccaaaaatcggacattgcatagttgtggcctgattgagtggatgtaaggcgggggtactttgcttctgcattttgttcgggagtattgtaattgctccaatatttgccatcaatcagtcggggaatagcaccgaaattgttacgcaacggctgaaccatttccgtttttttgcattgcaattgttttcctattccttgcatgctaatattcaaatcaaaacccttgtaatcggcatttaaagtggcgccatataaaaaacggggttgtgaattacccaataatactctgtctctgtccggagagatcggtgaattatcggttggatcggctttcagatacttgatatcacccggtttcacattattattcatcactggagtattcgcaatttcttccgatgtttggaaaataccatctgtacgatatccgtaccattcgttgaaatagctacccattctctttattcggtctcctaaaaattgatttcccccaaggtaacccattttagaacgataatcgcttagattggcagatattccgtaatgaaagtcattgatatgatcattccagctcatttcaatttcaaaaccggttgttttcatcttgccggtattctgttgagggttgtcatatcctacataatccggtatatctacatccaaaatcatatccttagttatcttgtagtaatagtctgcagtcaaccgcaaacgtccgtccaataaggctacatcaagtcctaatccaaatgtttttgttgtttcccatgatatattgcggatggcgtattgccactgtgcggcagtaagataggaagtaacattattaccttcataaaataattggtcactataagccagtaaaggcaaataagggtattctccgacacggtcattacccaacaagccataagacgcacggaatttcagaaaagacagcggtttgatatggagatccttaaagaatggttcttcgctgatgacccacccgccggatatggaaggaaaatatccgatacgatgtttcttgtcgaagcgggaggaactgtcactacgcaggttagcctgaagcaaataccgattgttataattatacataattctaccgaaagtagatcggtaagcagtgtgcttggcattgccattattgaactgatagtcacttgaacctctgtcaagataggggtattgtgtcaattcaaaatgatcgcgggaagccttgaggtcttccgttttataggtattgtcttcataccccagaagtaaagttaatgtgtgattaccaagcgtacagtcataattggcgaacaactgtttggtaatgctttgcttattgcctcttgattcacttagctgtgtagaaccatagtctgtaatggcgccaatcagttcattcggattctctgcactaaagtattcgatacgctttctgaactcctttgtacgtgaatcgttataaatgggagataacacggctgataatttcaatcccttgaccggagtcagatacaaagctattttcccactgacctgattgtaatactcttttttgttaccgccataatgtaactttgcatagggattatctcctgattttccatcggctatacgtccgtcgctccaagtagcggcataaacctgagggaacaagttactggcatccataggatcgtatgttggcttggtatagctggatctctttacactgatatcaaatgccgcagaaatatatttgttgatttttatatcattattcatacgaacagtgaaacgctcataatcacggttgttgtacaaaccgtcagcatagtcatatccgaaagtggctttggttcgtatatgttccgttcctcctgcgatgctgaaagagtgtgtctgtttggtagctttgttctttagcaagacgtttctccaattcgtattgggatatttgtctggattttcgcggttatactccatgtaattatctatcgttgtagcagcgtatgtaggatactcgtcgcttccattaccagcatcgttccaacgtagctcattagtcatttccatgaagcgttgtacatctacaaaatccggtctggcggtaggtttatctatcccgaattcataagaatattccaaagagagttggttagtcttggctcgtttggttgttacaataataacgcctgaagcagctctggagccataaatagcagctgaagcagcatctttcagtgcagtgatactttccacgtcgttgggattgatatcattaatgttatcggcaggcacaccatccactatcaccaatgggctgctttcgccaatcgtagtgataccacgaatgcgtatcgcactttgtgctccaggagcattgttggtacgagtaacagtgactcccgacatggcaccttgcagtgctgtagacaactgtgcaacctttcgatcggtgatcctgctacccatgacagaacttacagaaccggtcaagtcctttttctgtgctgtgccgtacccgataacgaccacctcgtctaatccttgggctgcctctatcaaaatgacatcaataacattcttataatcatccactttaacttccgtcgtctcatatccgatgaactgataagatagaacacttccggccgaaactgttatcatatagtttccgtccatgtcggagatcactccagtctttccgtctttatcggctatggttgctccagccatgggttcaccgtgtttatcagtgatacgtcctttgactgtctttctactaacggtctttttgacttttttcaaaataacatagtttcggtcaaactcatacgtaatgttgctatgggcaaagagcttatttaaagtttctttcatcgaagctttctttaatgagagagtaacagtcttgcttacgtcaacttcattcttgttgtacaagaagctatattggctttgcttttcaaccatgttcaatacttccgaaatggatgtgtctttcacttgtaatgtgattgtttgcttctcctgtgccaatgccggcagagaaaagcagagcaacatgataactggaaaacaaaaagtcgcccaccactgctgagcagttttcttcagtttattccagtttttgctgtttaataattcttttgacatgtttctttaaagatttaattgttagcaaattctaataataagattagtttattttatacagtttgccaatgtatttataaggcgattccaaattgtaatcacacacgttgataatcatatttttttaaaatctaaaaaacaatataagaatgatgtggaattttctttttaaatcgccctttaaacaagaatagtttattttatgccttaagagcctttgcatattacttaaaaaaacaatgtatgaaaaaaatttgctattattgtataggaattctttccttgttttcctgtcagcaggaaacagaactcgcagagacctctccttcaggcggggagcagatacaatttgttttggctgtagacaatgacaaaaacacacgtgtgactactgacgacagctttaagaccttttttaatgaaggagatgcggttggtgtctttgcggtatcgcatttaccgggtaattcaacagcgcttcaatctcaaggtaattacatagacaatcgaaaattaacacttaaagacggagaatggataatggaaggaactcctgtctattttccgaagaatggagaagttctcgatttttatgcttattatccttactccaaaaacattaatcctacagcaatcaactatgatgcttccaaatccatgtatgacttgatgctggcaaaaacagtagacttggcctcatcttccggaacagtgcaattattatttaaacatcaactgacgttggtggacgtcaagctgacttcgggcggtgggaaaaatatagagatgaaaaatgtaatacccgcctgtacgtttaatctcgctcaaattggtacacctgataaaatgaagcttgcagatgaagagacatctatgggaaatatagatttcgatgaagaacggaaaaagaatttcagagcttacataccttctcagcctctacaggaactgtcttttattataaaagccggaaattcggaacatgaatattctcccgctaataaacagtttgaacctggtaaagcttacagttatcagattgcttcaaaacttgtagatttgccttcattgcccaactgctatatggtgaagcctggtggagaaattacttttcccgtattgaaagcgtacgaagtctggcggcaggaatcctactgcgggaatccggatttgtccgggactttgagcgtatcattgttgtggatggacacagaagaccttattcctgagcaaggtgtaattttaagtaaagacggacaacaggcagataaaagtacgattactgtgagaacatctgccggcaagcaaggaaatgctgtcattgcagtaaaaatcggtaatgatacccgttgggtatggcatatttgggtaacagattacaatccggatgaacacacttatgcctatgacaacaatggagacggggtgacagattactactttatggaccgcaatttaggcgccttgactgatgatgcaaacaatcctaattccgtcggttgcttttatcagggaggtagaaataccccatttcccactagttctgtcacatttcccggagaaggagcatccgtcgcggatatccagttgttcggacacaacggaaataagccgaagattaaagtagaagctatttggggagacgaccaaggacagtctattcgtcgtgtattgaaagatcctctgctatttatctctgctaaaggcgagccctatagttgggtgactactaatccaaatgcctctaacgaccttgccgctgacttttggcctaacagtaagacaaaggaaaagactatttatgacccgtcgcctgcgggctggatgcttcccatctacaaaaacgggaaatcgccttgggagaatctgccgactacgtatactgaatatctagcttcggcaggaactgcattcggtaactatcctttggcaggaagattaaaattcgatggcactttccaatgggcaacaaagtcggcaatgatttattgcggagagtcttcctccaatctaaagacttatatggtaatgcttgcaaaagaccaaaacaaaatagataataattattatagtcgtgccaacgctatgccggtacgctgtgtgaaaattgcaaaataaaccgaattaattatatggaattatgaaaataaaacaattgataatattgtcattttgcctgtgcggcttggcagcttgtgaagacatctataaaggcggtgaaaaccatcagcaaacagaagttgccgttttgttcaagccatctatcacttcttatgacaaagatgaagtcgaaaagtggaaagaaggtgaaacggtaggtgtttatatgatacggaataaagccgatttttcattagagaattcgatcaaccaaattttcaataaaaaaatgcaagttcaggcggatggcatgttaaaggtctccggagaagagcctgcttttttgtatccgacagatgcgacaaaggtggattttattctctatgcaccatggaatccaagtctggaagagaatgtactacaacttgacgtccggaatcaagcaaaatcagatttttgcgattatctttacagcaataatgctaaaaacaagtatcgtacaaccacaccggtaaaagtggtattcaaacatgtttttgcgaaaatgatctttcatattagaaacggtgaaggtattagtgcggaagacctgaaagtgttgagactgacttgttctgatttgccggcaatagggaaattttctttgggaactgccgaaatgacagaaatggaagcgggagatatccctgtttctgtttcatcagaaggttcttatggagaatgtgtcttacttccaagtacgggaaacgggcttctactatttgatgttgccggaaatcagtatagaaaaaaaatagggaacatgacatttgaaatgggaaaacaatatacctttgacattgtggtttctctgcccggcattgaagttaatttaaaagagattgaagattgggatgtagaaacttttttatgattaaagaatatttctgaaaaacattttcgggggataatacttgttaataaattatcccccaatgaccatggcaataaggacagtatatataataccttaaataacaaatgaaagaaaaacatgtcatagatgattttgaattagtcaatcggatgcggaaaaacgatcaacatgccttttccactctttttattaagtaccattctgacctgttgttatactgtgggacttttattgcagacagaaacgaatgcgaagatattattcaaagcatatttttggaactttgggagaaaagaacagaattgagtattgatacttctttgagaagttttttactgagagctgtacggcatgactgctatgatgcaatcaagcatcgtagaatagttgaaagtcatatagcttatgtacttgaatgttctactgcaaccaattgggatgtagatcattatgtaagctattctgagctagagacacaaataaatacattgttggaacaatttgataaaaagtctgtcgatgtgtttcgtatgagtcgtttccaatctattaaatatgatgatatcgcaagagaaatgaacgtatcaagaagaaccgttgaggtacgcgttggaaatgtattgaaataccttagagataacctgaaagacttatggcctttgtgacttattttattaattatctaacaatataatagattaaataatggatcaacaagaatacatagatgaactgattataaagtgtttgtcaggcgaagcgggagttgatgaatctaaagagttgtctcgttggatggatgcggacaaggagcatttggcttatttcctgaagatgaagaatatctgggatatctctcatcctgcttttgatattgaaagcattcaacctcagtaccggctggaacaactcttagagaaaataaaaggaaggcaaagaagaaatcggcttgaaattttcgtcagaacttggcaacggatagctgctttcatagctgttccattgcttctttcgactttctatttgggatatcttcagaagaaagaatcgacaaatcacgtctggcaagaactgaatgccttatatggcacacgaactaaagcagtgttacctgatggtagtgtagtttggatgaacggtggtagtacattgcgttatccgcttcctttcgaaggtaaaaagcgcgatgtcgagttgaaaggtgagggctattttcaaatagctcctgataaaaaacgtccattcattgtacatacgcctcgtcttgatattgaagctttgggaacggaatttaatgtctatagttatgatagtgacagtttgacgcaagttacattggtcacaggcagtgtatgtgtttcgtccaaagaacgtcgaattcttatgaatccgaatgaacgtatcgtttacaatcaccgcaacaaagattatcaattatatttgggtaatcctgaaaaatggtgttcatggaagcagggagaattagttttccgcaatgaaccgttgcaggatatttttaaacggttaagtcaaatgtataacatcagtttccaattggatgaaatgagtaaaaatctgatctgtcatgcaacttttaaagatgaatcattggataggattttgcacttattggaaaaaactatgtcaatagagtgtcaatatcttaagaatggaagtagcgatcatactgaaaaacaatatgttaaaatcagctgtaaaaaaagaaattaataaattatgaagaaatattatctgttgtgcgtcatgacatttactgcgataagttcaattttcgctcagaaacaatacactcttacatctcctgacgaaaatctgcagacaaatgtgtatgtaggagaaaaaattgagtaccaaattcaaaataaaggaaaaattttattggaaaattctccgatagcactgacactcgttaatggaaacacatggggagaacaacccaaagtcattaaagcgaatcattatgagaaaaaaggcaatattgtttctcctttttaccgtgcagattcaataaccgaaaactataagtcgcttgtgcttcgctttaaaggagatttcagtatcgagtttagagcctacaacgatggaatagcgtatcgcttcattaatcactccaaacaacctttctgcatcaaaaatgagacggtagagtaccattttcctgataattatcaagtcacagttccttatgttagggaaaatgaaggaaatatagaagcacaattctttaattcatttgaaaatgtgtatgaaaccacatcgcttacaggctataaccctaaacgtctgagttttctgccactattggtcgatacgggcaccggagtaaaaatgtgcattactgagaccaatctggagaattatccgggactctatatgaatatttcccaaatacatccacatacaatggtgggagtctttgcccgttatccaaagtacgtaaagcaaggtggtcataataatctgcaattactcgttacggaacgtgaacagtatatagcagaggtgaatggagcgcgaacctttccttggcgaattattgctatagctcaaaaggatacagatttagctgcatcagacttgagtttcttattggcagagccgtcccgtatttcagatatctcatggataaaaccgggaaaggtggcttgggagtggtggaatgcgcttaatttggctgatgtagaatttcgtgcttggaaaaatacggatacgtacaaatactatattgattttgccgcatcaaaaaatatagaatatataatattagatgaaggatgggccgaaaacggtaaagcgaatttaatgtgcgttgttcctgaaattgatttgaaagctttaatagattatgcagctacaaagaaagttggcattatactctgggcgggttattatgcttttcatcgggatatggaacaagtgtgcaagtactattccaagttgggagtaaagggctttaaagtggactttatggaccgggatgaccaaaaaatgacagcctttaattatcaggcagctcaagtaactgccaaatacaaactattacttgatttacatgggacacataaacctgcggggctaaaccgaacctaccctaatgtactgaattttgaaggtgtacatggattggagcagatgaaatggaacgatatcagtaaggaccagatgaaatatgatgttaccattcctttcattcgccagttagccggtcccatggactacacgcagggagctatgctgaatgcaaccaaaaaagatttttacccttgctatttcaaacctatgagtcaaggaaccagatgccaccagttggctctttatatgattttagactcaccgttgaacatgctttgcgattctcctactcattacaacaaagaaatagaatgtacagaatttatcgcttccattcctacagtatggaatgaaacaagaattattgacggagaagtaggtgaatggattataactgcccggcgtaataattccatatggtatgtaggaggaatcacaaactggacatcgcgtgatgtaaaattagatctctcttttttaccgcaaggaaaatataaaatagaaatcttcaaagatggaatcaatgcagaccgcaatgcaacggactataagaaagatttttttgtaacagaggatattacaaaaatacataagcttcatttagcaccaggaggtggatttgcgatgaagatagagggctacttaccttaatttgatatagataactcaagcaattataattccactttttaatgacaatagttcgttaagttttgaattaacaataaaatattaagtcaagtcgaaccgattcattatattaagggttcctacatcctgaaaaaaatgaatctgaacgaacttgaccaatatagtgagataatcatcggcttgctgaataaatcggcggtaaagataaacaatagttcgttaaattttaaattaacatttaacgaactattgtatacaggaacagccaaataagatattaccggattctgacaagattaggtaatgtcttattttataatgaggaaaattgttacctttgtatatatcttatatttacaattaagattaaacctaatttttcgcttatgaaaatagttaaggctacctacatcgttatattattcattaccggactattagccggagtgttcttctcatcctctgtttccgcccaagaaatttcgggaacctggcacggaaaactttcccttcccaccggttcattgactattgtattccacatcagtcaaacggaacaaggcgcttatgtgaccacactggacagtcccgaccaaggagccaacggtatcaagacacagaccacttctttcaatgattctactttaattatccagatacctgtgattcatgcttcgtacaaaggaaagctgaacagtgataacacaatcaacggaacatttacacaaggaatgccccttccgttgaatctggtaaagggagaagccagccgtcccaagcgtccgcaggagcctcaaccgcctttcccttacagaagtgaagaagtcaccgtgaggaatgaacgcgatggaattaaccttgccggaacattgactcttcccgaaaaaggaactaagtttccggcagtggtaatggtgacgggaagcggtgcgcagaaccgggatgaagaaatcatgggacacaaacctttctttgtcatcgccgattatctgacccgaaacggaattgctgtacttagatgtgatgacaggggtactgccgcttcacaaggtactcacgcaacagctaccaatgaggattttgccacagatacggaagcaatggtgaattatctgcgcagcagaaaagaaataaatgcaaagaaaatcggaattatcggacatagcgcaggaggaatcattgcattcatcgttgctaaaaaggacctatccattgcatttgtcgtttcattggcaggagccggtgtaagaggcgacagtctgatgctgaagcaggtagagctaatctctaaatcccagggaatgccggatgccgtctggcaagggatgaagccttcaatacggaacagatatgccatactgcaacaaacagacaaaactcccgaagagttgcagaaagaactgtatgcagacgtcacaaaaacaatgtctcccgaacaattgaaagacctaaataccatccagcagatatctgcacaaatcagttcgatgacttctccatggtatcttcattttatgagatatgacccaggccaggatttgaagaaactaaaatgtccggttctggctctgaacggagaaaaggatattcaagtggatgccgccatgaatcttgctgccattcaggaaagaatcaccggaaatggaaacaaaaatgtaacagtcaaagcctatccgaacttaaatcatctgtttcagacttgcgaaaaaggaacattggctgaatacgggcagttggaagaaacaatcaatccggaagtcttgaaagatatcattgaatggataaggaaacaataagtctattaatgatattacttagcaagtacacatttctcaatatcacattcttttcttgctaattcttgcaaattcttcaaatatttgcaagaattggaaagaaagtaaatggctacaatttacatatactacataaatctcccgtcatcagcttacaccaacattgtctaatttgatttaaatcaaaatccatctcatcgaactcaccctgaaagattttgttttacctttgcagccaaaacaaataagcggcaaataatagtaaggtaaaaaggtaacaggtattaaggtaaagttttgtatgaagaagagtcttattgcattggcgttcggcacactgggattaggtattgccgaatttgtaatgatgggaattttgcccgatgtggcaaaagatttaggtattagtattcctaccgcagggcatttcatttctgcttatgcattaggcgtctgtgtcggtgcacctgtattgacactggctcgcaaatatccgctaaaacatattctgttagtattagttaccttaattatgataggtaatatctgtgcggctatggctcccaattactgggtgttgctcgctgcccgttttatctccggcttgcctcatggtgcatacttcggagtaggctctattgttgcagagaaactagccgacaagggtaaaggttcggaagccgtctccatcatgattgcaggaatgaccattgccaacctgtttggtgtacctttgggcacttccctaagtaccatgctttcctggcgtgccactttcctgctggtcggtatctggggaattgttatcctatattacatctggcgatgggttccgcatgtagaaggcttaaaagataccggctttaaaggacaattccgctttcttagaactccggctccgtggctgattctcggtgctacggcactaggtaatggcggtgtattctgctggtatagctacatcaatccgatgcttaccaatgtgtccggcttctccgcagaaagcattacgcctttaatgatccttgccggcttcggtatggtagtgggaaacctgattagcggacgtctctccgaccgctacacccccggaaaaatagggactgccgctcaagcacttatctgtattatgttattgctcattttcttcctttctccctataaatgggcagcagccctgttgatgtgcctttgtacggcaggactgttcgctgtatccagtccggagcagatattaattatccgcgtatcaaaaggaggagaaatgctgggagcagcctgcgtgcaggttgcattcaatctcggaaatgccatcggtgcttatgcaggcggactggctgttagtggtggataccgttatccgtccctggcgggtgtaccattcgccctaattggatttactttattcctgattttctataagaaatatcaggcaaaatattaaaactctgccaaaatgcctatctttgcagtcagattatcgataactaaataaaaacgaaatagataaatggcattgcaatgtggaataatggtaatgccatattcaaaataataaaagagtaacaaaagaatataaatacactatatatcaatatattacattcatttgtcattttctattgttacttcatttttcccttccttacccttgtttcttgttacttctgttactcgtttgttactcaaaaacaaaaatattttctatctttgctactgtatcaaacaagaattaaccatgagcaaagaagtgaaaataaaagagccaatccgtatcagaaccaagaaactgaacaatggaaatgaatctatttacttggacatctatgtagatggaaaaagaaactatgaatttctaaaactctatcttgttccagaaaaagaccgtgcaaccaagaaccgtaatgcagaaaccatgaaattggcaaatgccatcaaagcgcaaaaaatcgttgagatacaaaataaccgctatggcttcagcaacagtaaaaataagtcaaacatcaagttgattgactatatccagtacatagctgataaagatgtagaaaagacaggcagaaaggtcacctctaatacccttatccatcatttgaagcgatacgataagacaggagttacatttaaacaacttgataaggaatacattattggttttgtcgaatatctaaaaacagctaaacagcaacattgtaagaaagaaaaatatgtaagcccaaatacacgtgcccactactacaagatgcttcgttattgcatcaattatgctgtaacagaagatattttacctgctaatcctatggataaaataaaattggaagataagccaaagcaagtacaagccaagcgagaatttctcaccatagacgaattgaaaattttgataaaaacagatttccgcaataacacggtaaaacgagctttcctcttctgctgtttttgtggtattcgccattgcgatgtagccgccttaacatggggtgacttaaaggaagataatgaaggaaaatataccctcaatatggtacagcaaaaaactaaaatagcaatttcaataccactaagtggtgaagctgtaaagcaactgcctcctaaaggcaatgcaaagtccacagacaaagttttcgctgatttaatatcattgggcagaacaaacgaaatattgcccaaatgggcagaaagtgcaggaatagacaaacatcttacattccatgtatcaagacatacccatgcaaccatgatgattacacttggagcagatttatatactgtatcaaaattacttgggcatacaaatattcaagttacgcaaatatatgctaagattgtggatgaaagcaagaagaaagctattgacctgatacccaacttcacagattagctaacaatcaaaataaaaaaagtaaaattagaaccacataaaaaagattttgttacttttgtaatagtatagaatctattcaaaaagaatatatggaacaattaagtcacatattttccataggacatggaagcaaagatatcaaagagcttatattggaactacaaagtttcgatattgagtttcttgttgatatacgctctaaaccatattctaaattttatactcattttaaccaaggcttcctcaaatactctgtagaagaataccacattaagtatggatatatgggagatttattagggggattacctttagatagaacgtgttatactgatggtaaagtcgattataacaagctaaaaaacagagagttcttcatcgaaggattaaaaagattacaaaatgcaaatagtaaaggatttaatgtttgcattttatgcagtgaaagcaatcccaaagaatgccatagagcaaaactcattggagttgaactacaaaaaatgggaattgaattaagacatatcattggtattgagaaagagaaaacacaaaaccaagtaattttcgaactaactaatggcgatggtcttaataccatatttggcgaagaacatttcacatcaagaaaaaaatacatctaataaaatatggaattctacacaattggggtatatggctccacagaacaatctttctttacaaagctaaaagaaaatggaatagatacattttgcgatattcgacaacggagaggagttagaggtaaaaaatacgcatatgtaaatagtacctatttacaaaacaaattaaaagaatatggaattaaatatttatatataagccaattatctccaactactgaaattcgagagctacaaaaagaaatagataagaagaatggaatatcgaaatctgctcggatagaaatcggaaaagtatttgaaattgagtataagaataaaatattatcacagtttgattttgacaaattaatacatacattaaaagaaaacaattctcagaaaatagctctattctgcgttgaagaacatcctgaagcatgtcatcgttccatagtagcaaaagctttacaccttaaatacaataatttcattaaacacctataaaatgaaagttctaatagtatcaaaaacacacatgaatacaggagtatgcgttggaggcataacttttgatggaagatttgtacgattgcttgataataatggtcacaatcaatctgacgattgtccatttaaaatcaacgaggcttatgatattacattcatagaaaaacaaaatccgaccccaccccatatcgaagacattttagtacaaagttctaaatatgtaggacgacttaaagatgacataagcatgattgactttataacaaaaagaaatgtcaatatatgcagaggtaatattgataatttatttgataaggctctaaaatttacaactaatggaagtggatacataaattcttcaaaaattccacaaaacagtgtttctttttggattgccgataaagacctaataaaaagtatagattctaaaggaaaagttcggtataaatatcaaaccgatgatccttggagttctgagatacaaattaaatatgtagggctacaacctacagaagacataattcccaaaggaacattattacgtgtttctcttgcacgatggtggtcaccaaatgatgttgaagttgaaaacaggtgttatttacaattatcaggttggtacaaataataacataaactggcgaaaaacagaaaaacatttctcttttcgccagcacctattttgctgctgttcatacaaatgagtttagtttgttttgaacatatagacaaaggaatagactaaacctaatcagtaaatctattctataaatatacaaaaaatcaaatcgtgaattatattagatttaccttttgtatattttagctaaataaagaatttacaatttaaatcctttactccttttctgttcctgttttgactgtatgttctgatgtagtttgttaaactgctctttgaaccattcggaaatcggttgtctgttaatgcttagaaccaacttcgtattatctgtcggattcttaactacttggaaaccggtcttttccgttgcaaattttcgtctatattcctccgagtacaaatttccactgcacacaatcggctcgccttttacaagtttgtttgtcaattcctgattgaaaccgacaaggcggcatagcttttcaatgcggagtaactccatgaagtatggaaaccatttgcacgccttctcaatgatacggttaagacgtgaaatttccttgtccctctcgttcagtatttcaatgtgcttcgcctgtacttctgtcaattccttacggtgttgtttctgctgctcccgcatcatggtttgcagcctttctatgctctcgtcacggctggtaacttcttcatacagttgcctgttctcctgtttaagctccttgatttccccactacccaaaagagaacccacctttgcaataagagcggcttttgcttcggtcttgaccgcttcaagtttctgcgttcctatttctttcttaacctgttttaaccgcttctccgcttcctccctttcctcttggagttgttgcacgcccgtttccagttcgcccgcctgccgcttcaaatcacggtaatactgggctgtggtgacgtgccttgcttccgaaccacgcacgccacgttgcaaaccgtatttatccatgattttggcgtagtcgtcatggtagcctatcaacttgtcacggttcaatacatcatcagcacatagccggactgcatccgttttctttcggtaggaacgcttaccctccgtttgcttctgttttgctttcctgcgctctcctgttactatcggtacgatggtagcatgtatgtgaggtgtggtttcgtccatatgcagaactgcagaaacggtattctcccgtccgaaagtcttgtgcaaccattccatactgtcgttgcaccattcgtccatacgcccatcttgctgtatcttcatcatatcctcgtgtgttcccgacatcataacacggatagcccttacttggtcgggtgtaatcttccgtttgatgcctgccgacttgatgcgatgcgctatcgcttcatcacgtaccgtcacaccttcgggaagttccaccagttcccgattaagatgtgtacgtgtaggatccacattcggagctatcactctgcgctcgatatggtcggacatacgagcgtcagatgctccctttgctttcttgaaatcaagggtgaaatatcccatgttgtaatctgtttttcgttagacaattccgtttgccttacacattcgccgcatggctcacggggtttcaaaaggggcgatgcccctttgctcgatagggcgtttttagcggtgcttgcactgcgtgaagaaaacgccctattgagctatggcttttacttactcaaaagcctgtggaaagcgtgcggtaactacattctgaaccctctgcttttctttttggctggttgttgttcctgcctgtcggtttgtttgaccgtctgtgattgcttggtctgctgtgtcaagtctgccgactgcatcaaccgtttcccacacaaataatcattcaaatctttatagccactataaatgcgtgaggaatcacggacacggaaactgtactctttataaagttcctgtacggctcttatccctgccgtatcattgtcgaaaaaacaatgtattttctcataattccccaacgggtacaaggctttggaaagattggaaacagagttcagaataagatagtcctgcttgtcaaagtcgggataatcaggacaatttttctgtcgcaaggtcagaaaagaaagatagtccataaacccctcgaacacatagcaggtttctttaggttctccagcctgacgtatatgggtgatgtctttaggagctatgcagcccttaaaatatttattgcgtacctcgtaacctcccgatgcgttagggaagccgatggcaaagttccatttaccgttaagcgagaaacggacttccatacattcttttttcgcaagtgctgtatttatgcctctatcctgcaagtatgcaaacaaggcaggagaggaaagcggtactgtttccaaatgttggaaactcggttgcgttgatgactgctggcgaaaggaaaaagaaacgggacggatagaggggctttgctccgctatacggtctaaaaggtagggtaaactgtcggatgcgtaaagctcctgtgccaatgcaaggatgttgccgccttttcctgttccaaagtcataccacaaattgcggtctgtattcactttgaaagaaggctcttgttcctctctcaagggtgatttgtaccaaagactattgccctgttgctttatcgggttatagcctaaactgtgcagatagtctgtcaactttatatttttggattcttcgattgtcataatctgaatgtattggtgaatgaataattgaatcagttccgtttagtccgctatatatacacccaaactgtactaaacttatcttgtacttaatcgtacaatgaaaagaagtccatttcttctatatataccacacggactaaaccaaccttgcttttagtagtggaaatcagaattgaacttgtagcctttcccctcttttattatcatgcgcttgtttacaaggaatttgttcaagtccacgagaatattgcgcccacgttcaaaaccgatacttgcgtaaccttttttcaaggctgcgataacattgggatagccttgtactacatcctttccaaatccgttttccaacgcttcacggtgctgttgctccgtaagttccgtaagcggaaagttgcggttctgcttgggttgctcaaaaacatagtctttcacaacttcgggcaatgcagtttcattgatgcgaaatgcaaacggttcaaagtccttgtctcgaatgtgcatcgcctttacttcgctaatatccacatcctgcgtgcttttggttatctctaaaacggtttcagccttgttgttaagttccgttccaatatgcccacgtgtattatcatcccctttattcaaatgtaatactgtgtgaatatgcaaattatactcacttgaccatcgcattaaaagattgatgaggtcggatgattcgctggggctgttgatgtcgtacatcaaatcacggatgccgtctataatgacaagaccaattccctccatattagcaagcatatagcctattatctgctttcgcttgtcgggtgtgcattccctcaacacgacaaatataaaatcctctctatctttatcggtaggaagaccagccaaacgcatgatgcgttccatcaccttatggcagtggtatttgctctgctctgtgtccacatatagaattttacgcttgttttcgggcaggaacgctgaatattgcaacacttcatcattcttcaatgctgctgccacaatagcagaaatattgaacgtctttttacttttggctttacctgtggatgcgctaaaatttcctagtgtgccaatagttgaaccattcacccaaaggatttcgggcggcacatcgtaagtatcggtaatcttcaaatgaatagttttccaaaggactgcaaaatcttctcttgtcatagcatcctctttcttcttctccgtcactttcttttcttccatagctttacttctttaaaggacggttattgaggatatacttctgcgcttcctgttctatttgcgcctgtgtcttgataggattttggcgcaaccacgcctccaactccaccttttcaaagtaaagcattttgccctgtggcttatagtgaggtatcaagttacccgaagtcagtttgtacaggtaacttttagaaaggttaagaaatttgctcgcttcatcaaagctaagcacattcttagttaaaaacagcatctgttcgagttcctcaactcgcatctctaatgtcttatccatattgctttttgggatttagtgaaacaatatgaaggtgcgcaccctcgttttcttttcgttaacgagagcaaaggtattgaggattagcttgatagtggattaagctatgtttaaggtcttaacctattcttaaagtcttttcagttgtttgatatagttgtatatggttgcaaatcctttctcatgggagatgcctttcacataattggttgctgtggctaaatccccttgattgaggtatttatccctacttttgtctttggaaagaaacagtttattattagcaatgaccgattgccaattagcggtaatcaaagacctgttacttaattctgaaaaaagaaaagcgacatatctattattgtttgaccttaatattgcattaggcttacaggaaagtatcgctttcaaatcatcaacagtcacagaggcattgaatatcttaacctcattgatgcaatccgcaattaattcaatctgtctatcattaagaattgaatcaaaaggattttctgtttcagcaatagggggtacagcttttatcgaaaactcagtgtttgttatctgcttctgcacttcctgttccagctgcggttgtatttccgtctgcgttctgtcctctttcttttttcgcaagtatgccaaatatctttccaacacaacggctttaacaactacagaaaaataaggcagttcttcatcataaactgaattattttgttcatatcgggaataatcaaatgaaagaggggaaaataaaagatactttcttttttcatcaggcttcagggcttcataaaaaccgctttcccaaaagaagtcatgtatgaaataacaacgctgcatctcacttagtacagaataactcatgtataagctcgctaattcatcagcattatgaatatactcttgcccctccaattcttccacctgttccgtattcaggtattgggatttcatataaatgtttctttctaaagtttcataggcatggctaatgcaacggtcaaataacctttgtatattgtcaaatttagctttaaactctgtattttccataatgttctctgtttcattaatatgagcaaagataacgattccgcttaaaaactaataatagacaaaagagaaagtataagaagataaccacattagcccaaaattgattatctttgcacaccaaaacgaggtagaaggagcaattattcttttttaactttatattgttaccattttgttactcgtctattttacagtaatacataactaattgataataagaaaaataatataatattatggcattacaatgtggtattgtaggactaccgaacgtgggtaagtcgacacttttcaactgtttgtcgaatgcgaaagcacaggcggcaaatttccctttctgtacaattgaacccaatgtaggtgtaatcactgttcctgacgaacgtctgaacgcactcgctgaattggtgcacccccaacgaattgttcctacaactgtagaaatcgtagatatcgccggactggtgaaaggcgcaagcaaaggtgaaggactgggaaacaagttccttgccaatatccgtgagacagatgcaattatccacgtactccgttgcttcgatgacgacaatgtgacacacgtagacggaagcgtaaatcccgtccgcgacaaagaaatcattgactacgaacttcaattgaaagacctggaaaccatcgaaagccgtatccagaaagtacagaaacaagcacagacgggcggagacaaagctgcaaagttagcttacgatgtactcgttcaatataaagacgcattggaacagggaaaatctgcacgtacagtgacttttgaaacaaaagacgaacaaaagattgctcacgaactgttcttattgaccagtaaaccggtaatgtatgtctgcaatgttgatgaagcaagcgcagtaaacggaaataaatacgtagatatggtacgcgaagccgtaaaagacgagaatgctcaaatcctgattgtcgcagccaaaacagaagcggacatcgccgaactggaaacgtatgaagaccgtcaaatgttccttgccgaagtaggcttggaagaatcgggcgtagcacgtcttatcaaatctgcttacaaactcctgaatctcgaaacatatttcactgccggtgtacaagaagtacgtgcctggacatacgaaaaaggatggaaagctcctcaatgtgccggagtgatccacaccgattttgaaaaaggctttatccgtgccgaagttatcaaatacgatgattatatcaaatacggctcggaagcagctgtgaaagaagccggaaaactgggtgtggaaggaaaagaatatgtggtgcaggatggcgacatcatgcatttccgtttcaacgtgtgattatcggtaactaccgacgacttattaattactaattcgctaacaatatgaaatatctcattgcaggaacgggaggtgtaggcggcagtatcgcaggattcttgtcgctggcaggcaaagatgtaacttgtattgcccgtggagctcatttgcagtcgattcaaacgaacggtttgaaactgaagtcggatttaaagggtgaacatacgctccgaatcccggcaactacggctgaagaatttagcgagaaagcagatgtgatatttgtatgtgtgaaaggttattcggtcgattccatcgtagaactgataaaaagagcagcacacaaagacacggttgtcatccctattctgaatgtatatggcacagggccgcgcatacagaagctagttccggatgtcaccgttctcgacggctgcatctatatcgtaggcttcttatccggcaccggagaaatcacccaaatgggaaaaatattccgtctggtatatggtgctcatcacggcacggttgtgaagcccggattgctggaagccatccaacaagacttgcaggaagcaggcataaaggtagacctgtcaccagacatcaaccgggatacgtttatcaaatggtcgtttatctctgcaatggccgtaacgggtgcttactacgacgttccgatgggagaagtacagaaaccgggaaagatacggaatacatttatcggactttctacggaaagcgctgccttaggaaagaaactaggcgtcgaatttcccgaagacccagtcagctacaacctgaaagtgattgacaagctcgaccccgaaagtaccgcttctatgcaaaaagacctggcacgcggacacgactcggaaatacaaggattgctcttcgacatgattgcagcagccgaagaacagggaatagatataccgacctaccggatggttgcggagaaattcaaaaaatctaatcattaacattaatccaatatagaatgaataccatgctattatccatcaactggaacccgaatcccgaactattcaacctgttcggcatttctatccgttattacggattactgtgggcagtaggaatattctttgcttatgtggttgttcactaccagtaccgggataaaaagatagaggaaaagaagtttgacccgcttttcttttactgtttctttggtattctgattggtgcccgcctgggacactgtctgttctatgatccgggatactacttgtctcatttttgggaaatgattcttcctatcaaattcatgccggacggaaactggaaatttaccggatatgaaggacttgccagccacggcggtacattaggattgataatcgccctttggctatattgccgcaagacgaagctccattatatggacgtgctggatatgattgccgtagctactccaatcaccgcctgcttcatccgccttgccaacctgatgaactccgaaatcatcggcaaaccgtctgatgtaccttgggcattcgttttcgagcgtgtagatatgcaaccccgtcatccgggacagctctacgaagccattgcttatcttatcctgttcttcatcatgctttacttatataagaattacagcaagaaactgcatcgcggcttcttcttcggcctttgtctgacttatatcttcaccttccgctttttcatcgaattcctaaaagaaaatcaggaagattttgaaaacagcatgatgttcaatatgggacaatggttaagcgttccgtttatcataataggcgtctatttcatgttcttttatgacaagaaaaaaaagaaaatagcctaaatcaaaaaaagagggattagcggttcaaacatcgctaatcccttttttttatcaataaaacaaatgccatttccctaatgtcaggacaataatcgaaaacatatcctaagacattatatacattttcagcttatttccccctgactatcttcttaatatcattcagtttattcaacgcttcaataggagtaagattattcacatcaagattcaatatctcatcgcgaatctgacagagaatcggatcgtccaactggaagaagcttaactgcatacctccacgattctcgctcacttctgccaacggtttacctgctatgccctgttggcgattatcagattcaagctgtttcaatatctcatttgcacgtttcacaatgcttttcggcataccggccatctttgctacatgaataccgaaagagtgttcactaccgccacgttccagtttacgaagaaagattactttgttatcaacttctttcaccgatacattataattcttgatacgcttgaaagatttctccatctcattcaattcatgataatgcgtagcaaataatgtacgtgcttttgctttgggatgttcatggatatactctacaattgcccaggcaatggaaataccatcataagtagaagtaccacgacccaattcgtcaaataataccagactccgggaagaaacattattcaggatatcagccgcttcattcatctctaccataaatgtagattcaccgactgatatattatcgctcgctcctacacgggtaaatatcttatcaactaaaccgatatgcgcactttccgcaggaacaaacgagccgatttgagccaatagcgtaatcaacgccgtctgacgcaagagtgccgacttaccggccatgttcggacctgtaataataataatctgctgtgtatcgctgtccagcattacatcattggcaatatacttctcacctatcggaagttgtttttctattaccgggtgacgtccctgacgaatatccagtacgtcattatcctcaataatcggacggatataacgattctcacgggccacattggcaaatgacaacaagcagtccagacgtgcaatctgattcgcattaatctgtatctgtggaataaactccatcaatgcctgtactaagtccgtatatagctgcgtttccagaatcagaatcttatcttccgctcccaaaatcttttcttcatattcctttagttcctgcgtgatataacgttccgcattaaccagcgtctgtttacgaatccactctttaggaactttatctttatggacattacggacttcgatataataaccgaatacgttattataagccactttcaaactcggaatacccgtctcctcgctctcccgctgctgtatctttagcagataatcttttcctgaataggagatttgccgcaattcatccaagtctgcgttcacaccatcttgaatcactccacctttatttatcagtaaaggaggatcatttttaatctctttggcaatccggtcacgaatagaaatacaaagattcagctgttcgccaatacgattcaaactcgcattatcagcttccatacatgcctgttttatcggctcaatagcttgtaaagctaccttcaactgaacgacttcacggggcgacacacgtcctacagccactttggaaataatacgttccaaatctcctattaaatgcaactgttcttcaatcagttccttaaaatcaggttggcggaagaaatattccactacattcaagcgttcattgatcggtttctcatcctttaagggaaaaaccatccagcgtttcaacagacgagctcccattgggctgatcgttctgtcgatcacattgagcaggctacttccgccatcattcatattaccaatcaactcaaggctacgcaccgtaaacttatccagacggacgtatttatcttcttcaatacgcgccaatgaagtgatgtgaccaatttgcgtatgctgcgtcattgtcaaatactgcaaaatagcaccggaagcaatgatgccattcttcaaatgctccactccgaaacctttcagattcttcgtttcaaagtgtttcagcagtttctcacgggcagtcgtttctgtaaatacccagtcgtccagctcgaacgtgaagaacttattaccgaaattaccttcaaacatcaggcgtttgccacgttcaaaaagaatctctttaggggcaaagttattcaacaacttgtctatataatcaaaaggtccttctgcagtaagaaattcaccggtagaaatatcgagaaaggcaactccacaggaagcttttccgaaatgaacggcagccagaaagttattctctttatagttcagtacattatcattgatagaaacaccgggagtaaccaattcggtaatgccacgcttcaccaacttcttcgtcattttcgggtcttccaactggtcacagatagcgacacgttttccggcgcgaaccagtttcggaagatatgtatcaagggcatgatgaggaaaacctgccatctcgatagtttttcctttcccattggcacgttttgtcagtgtgattcctaaaatttcggctgcaacgatggcatccgtagaatatgtttcataaaagtcaccgcaacgaaacagcatcactgcatccggatgttttgccttcaaatccagaaactgtttcatcatcggggtgaggacgatctcttcttcgttcacgggtgtctccttttcttttttgttgagtatataatgaattatccttgcaaagatagcggtttttcggcagagaatcaacggtatgctccgattcaattttcaaaattaatgttacataccttgaaaaaaggagagtttatttcttaataagtaggagaaaactattaaaacatgttataaaacatgttatttttcttggataatttgctattttcccaagagtccgtatcttcgcaatgtgtttttcatagtattagatttaaggttaacaaaggttggagcaaggcgttgctcctttttttatgcctatacgcttcctatcagaacagctatccttaaaacccacagggttttcggactgccctggattttgttttcaattactgatttgcataagtataacatgaacttttgattcataagtttcaccagtttcaccttgtagctgaaacatcgatgaataaggagatagcgggtgaaagcgtaggaaaaaaacaggtgaagccttccattgtcgctttcaccttttgaatttatttataccgattgatggacatatatagccatcgtgctgaatatatagatacaatacaatgagtatatagatgcaatctgttgaatctatagatgtaccatttcaagtattaatagatgagaaccaaggtgttaacacctgacgaataggctattaacatctgacagttcatctattaatacctgacaatggatttgctataagcatattttcattagctataatgatatccggattagctataatgatattgtttttagctcaaaggatattttgaaaagacaaggtgaaaccgataatgttctgtttcacctgattttacccctcgctttcacccgctatagccttattcatcggcatttcaggaatcaggtgaaagcgatgaatggcaataatcttatagtggcattagatgatactttagttataaagaaagaggtaagttacgcagtattccgctatcgaatgagtcagaactgcacagtttagctcatttatgcaccgtcatgagtgaaatgataaataaagaattaggcaaagtctgcccattacacttcacttataaactgctcaaaactatatttaaaatcctcattcaatattagcttatactccttggtgaattgatcaaatgcagtatatgccattcccatgcgtttcaaatccactaaagcacggcacttaacgcgaacagactcttcatctaacgaatcaaatcgcagaatacaatttgaaatttgtattctcaagttatcatttcctacaaattgcttgctatctcttaaccggctcagaagatcaatcattgaatcggaataatctgctttaaaactatctacccaatcaaattgcatattaggaagcaattgaccaaatgaagccagactcaataatttttctaaatcttccttatgaaccacatctaaaggcgccatcttttgcatcaattgatttgctatagtataatcattatatacatgccccttattaagaaagtaccaataaccatttgctgatgatatctccgtatctcccacctcttccaacaaaagacgtatcttacgtatatttacactacggttattagagaaactctcttctgacttatcataccacaacaattcttttaacttgatattagaaatccccttattattctgattggaataaagaataataacagataataattgacgcatgataggcgtaaattttccggtaatgtcttttaaatcccgattaattacctgaaatccgtttagcatataaattcccggtgtggtgttcaatacaggagcttcaaacgaggaatataggtggtcattttcttgaatttctttttcactatttatatctaaaacgcccccttcttctttctcacaaatatcttgttgcgaaatagatataacttctttcttatcatgctttctgctattccgcaatctccacccaattccccctaaacctgctacacaaatacatacaaacagtaatttccaccaagtccccttgttttcctgtactattatattttgaataggcaacactggagatgcaatagaataaatattagcttcataattattcccctctacttggtgaactgttacagcgtaataacatttttctgaagcaagataaattaaatctgcatgagaattaacatctaagaaagtataaggtattgtatcacctaaaacagtttcttgtccattctccaaatttaaatctttcaaaaccagagaagatagaaaacgacctgaagaaaaaaacaatccttttgcatgttcacctttttctacttcatcaactatcaacgtagaagcagctacctcatcacaaaggttctccggcatagcccactttttttccaaagaataatcattcaagttcaatttatacaaatccttataatgaacgaccccatactcctgtttgcccaagtcatttcccaatcctccataaatataaaccagcgaatcggtcttccctatggcactcaaatagcgaggagtaatcacatccggcaactctccctttatcacttcacccgacagggatattctattcaactcacgggtatacaaatgaaatccatatcccagaatttgtacaatcgatgaatcttttggattgaaaaaccgattatgttgtgtataagaagactgccttttccgttggataggaatagaccaactttttgtttgaaaattaaaaaaagacaaattctccccatcaggcttctcaaagtcataataaaccaactggctacctttatctttcaaaggaacaaaaagaaactggttagtgatccgatttacatcaatcaatggcgagaaaacatattctttagttgtactccgtattaaatcatatttgacaatacgatcttttgcaataaaataacatgccgactgatcttcacacgggacaggaaaagtcttggatgaaaaagataacgttttcctatgtttccaatacatatgactattaataatccattccggatttgatataaaagctgtcatctgccgaaacttgtcctgaagcaaagtgtcagatactgcttgctccaacgaccattcatattttatgctcccaggttccagaccgatctgtacatccttcaaaataataggtgccacgtccgaagtggtgtaagaagctaatttattagcaccaaagcagactttaacagaatgattatccggggcagtaactttctctttagaaataagagaaccattatttctgacatataacgtatcatttttatactccaattctatctttatcctattccactcatgaatatcgatagtcgcagaagaatgtatctttcctaaatattgctggtctttaatcaaacacaaataaggctcttcgttcacaggattaaccaatatcagattgaggctatttctattgtcaacaatcatacggcatacataaccaaaatgctcgcctttttccctaatcttcaaatcaaaagaaacagataaataatctttgaatctcactccctgattgccggacggtatgatgaatgaagtacgttcatcttttgaatattcataagcacgagaagaaaggcctccgatattttcaccaccccaagtgactatagtcttcgagataaataaaatataaaataacagtcggatatatttcatagcaaaagcttatttgaagcaaagatataaaaaatatgttttttcaatcttaggatattaaaataatatagttactctgcaccaataacgaaatatatccggctattatactccacatccctatcgaaccggcatccgggatgaacgcagttctcctctcaaatatttagcagcttcacctgccagccaaagataatgatcgggtgcttctccttcataagttataaaagaactttcacccaccggaggtgtatttgtacatttaaagaaagctgtcccctcatctatctcatcaaacattgccaaataaaggctctctgctcctgcatctacagcacctttcacctgtttccagaagaaacgtccccccaatctcggaatcatgttctgcggagcatcctttttcatgttatgccaactaaagcccggaaacaacaccggcatataatctttaccattcgctttgcaccactttatatcttcctctatcgatttacgatatggctcatacgtatgattatcaaaacgtcctaccaaccatggatgaacaatatccgcctgttttaccagttcaagcaatcgcgtatcagaaacagcatctatcgttaatgtccgccaatgagtaggtacacctaccaatatagaacaaccttcactcttcaggaaatcaatgattttctttacctgctcatatccatatttacggcgatcattaaaccctattccccaaacagcaactaacggtttaccatgatgataaacataatgattgttgttccgggaaactagtttatacttctcacacagctctttccagtcacgtatcaatatatcttcttcaccggcttccataccggaaaggtcatacatcaggcaaattgcccggtcatacttttctgccgaaagaacagcattattcagtatcttattataattatccttccctttctgatttcgtatagaaacaacaaaacgttgcataaataccccatcaattccatattgcttcatccatttaaaatgcagatctgtagtagaagcatcatacgaactaaaaacctttgccggtgtctcatcaggtaacttaaaagccgtttcataggttttctcatattcagaaacatccggccaaagatcaatggtacacctgcccggtttgaactctttttctttttcaaaatgtttccaacccaaaccagcaccgtcttcaggagtattaaaccaaccctgataccctgccatcactaaattccttattgatttgaaacggacacgactcatcgactccgtcgtttttgtcgccggatcagacatcaccacctctttcgggaactgatttaaagcaataaattcactgataaaccgatccggatatactttcacaagattcatcccttgataccctgtccccagcacctttcctatcggacctatcgttatcatttccatattgccaacctttccataagcattgttatgtaaatgccccgcaaatattgcgtttactccatatttctgaaacaaacgcacatatttctctcgcataggcaaagagaaattcgaataattcacaggttcatccatccgctttagaaaaacagagcaatgagtaaaaacaaacttgaatctggcatccttcgttttctgtaattcctgttccagccacttaaattgaacttcttccctctctttgtcctcttcttttattatatttgaatcaatacctataaatgcacaatcaccatacctgaatgaaaaatgggtttctccgtagttctttttataattatctatagaagcccggctgaccttacctatatcgtgatttcccggaatcatataaacctttactgaagagtctatttgagcaatcatcgacttataagcagcaatctgttccttactcttcgaattatttacaaaatcaccggttatcaccacaaacggaggttttaactgattaatagctgtcacagccttattcatagcctctgtttctgccgaaatactcttattattatccatgaagccaaattggggatcacttaattgcaaaaagaaaaagggagcagaatccgcagctatcccatgagatacaaaaacagccaagagaaaacaaacgaccgatattattttctttctcataaattatttattgttatcacgagatacgacgatctgcctgatgcgtcgtatcccgttattaataactattacttcttaaattgatttctggttatcttcagaaattcggatttgttttcctccgtcggttccaaattcgttcctttctggtaattattccatgaattgactaacacaatgtttttacttccgatattccgtttagctacattacagaaattaatataatcagcagtctctccatcttgcccgaaagtatatttataacttgaagttgaattgatacggtcattataagaaggaaagatacaaggaacaaagtctgtattccatttggatattgtagtcttccaattggcccaattcaaatcaacaaaactgaaaaaggcataataacggtcatacatattcgttgaccagtcgttcactgtcactccatcaaaagaagcaatctgatgttcctcataattcaccggagctacccaaccggtagtaaattctccaatcgtataaagatcataccccaattctgatacagccttctttaatgccgggatgaccaaagaataatcaatactcttcaatgcagaagaagaaaggttagacggagttattagaataaccggtcttccgttcattttataataggcctcatcattaaataaaggcactaaagtattcgtaaagtcattgatcatcttattcaaattctcttcctcttgaagcggtttgtcattagatactttcagatgtttggtgttataattaatcaccaagcgaacttttgcattggttgccgtacgtacagacttaaagttggtaatcaatgtattatctgctgaagcagcatcccaagtaactatcagaaagtccaaggcagcctcatccgcccaagcaagctgttgctgtaacactccactagttgtagacaaatattcacccaacaaaggagtaccggcatatattttcttaccggactttaaccagctggaagaggaagttatattggtataataagcaccgactatcgcatccacaggtaaatccgtctgtggtatatcatacacatatttgctcttatcaggagccaaatgatcgtctttatcacaagatacagctaacaaagcgatgaatccgagcaatataatagttatctttttcatatccttcattttttaattattcgtcaaataagggttagtcttagtgggcaatgcaaaccataacttagtcgacattgcatcttgtccaccatcgagatttgcaatacctttcgtcaattcatattcattgtttgttttctcgctatcgggatataccaatcgctgaggaatataagcataaggattatccttggtgcccgcatttacagcaccatatccggtttccggctggaaatgcggcgggaattccaatacttggctacggcgaatcaatgtccacgcatccaacgattgataaaacatagctatatattgctgcatgataatctgacgataaatcggatcaggttcatcagaggtaatagcagaagatacaatgccgataaaatctttataataatcttcaccttcttctgtgactgtgagatctgtcaatgtattccatttaattcccggagtctgaagataattattcacttttccaccgtctacgccatattgagccattgaagcgttcacaccagcattgtaataagcctcggctgtttgcgaaccacttcccaaacctttatgaaccaattcacttttcaacaggcacacttctgcataattcataattacctctgcataactttgctccgtgaatttatcctgtaattgagagtaatcatcagccgtctttccactatgcggattgggagacaagctgactcccgacggcaaattagatactttcggttgtccccaataaggtgcccaatggaagttatcaggcatagaagcagcattggcaggagtgaaaaatttctccaaccgcggatcagcatagggagccatatacatcagaatcgattcgccggcagagtgaagcttatccaaattactttcacggttgataaccagataatcataaaaataatttcttgtatctgcgttatctccccattgcaaaagacaattatcttcattacttgtcatcaagttctgttcattttccataagttcatcaatcacttcagtcgctttcgaacggtcagcattacaaatacgaacggccaaacgcaaacgtagtgaattggcaaacttcttccatttcaataaatcgctggatttctgtcctgaaggaaaaatagggtctgctttataaacatctccatccatcttcaacccgtcggcacatgctttcaaatcattcagcatagcataataaatatccgattccttatcgtaaggcactctctcgccggcattaaatgcctgacttttaggaatacctccccaaatagaaactgcttgtgagaaaagatagttttcccatattttagcaataagtacacgattgtgatattgctcgtcattttccatttgcgtttgtataaaatgaacaggaaaaatagcatagttatatacattcttccaatatgaatcattagttgaaccttgatttccataccgttgtacctgtccaccagtagctccaccataataatggctatagttggccaacaacacttttttcatacttccgcaaaaagcattcagcgtataataagaactcgtattgaacaaatattcaggattaatttcattcagttcattgggattggcattggcagattcaaagtcattcgtacatgaaacgaaagaaatggccattgcagcaaaaccggctaataatattttaatctgtttcataatattctatctttagaaggttagtttaatatcaaatccgacagaagatacgggcggcattcctccatattctataccttgagcatttcctgatgaagaagaagcctccggatctatgcctttaggagtattttgatgaagaatagccaaattacgtcctaccacagccagtcgtagaccactaatcggcaatttctttaggatagacttcggaagactgtaagcaacagagagttcacggaatttaatataggaagcatcaaatacagatctttcatcaaaactagcatagcggttattaggtttgacaaacaagaggcaaggcgttccgtcttcaaaataagcgtccggatattgataaccggaagttgccttcgcgctactctcaccataaatcacattactcaaataatatccttcacgtccttcggcagattcggcaacaacaccggctgttgtcgctctattccatgttcccgaataaagagttcctccaatacgtgcatcaaacaggaaactaactgtaaaattctggattctgaaattgcttccaaaacttcccgtccatttcggctcggcacagcctaaatattgcgtattatccgttaccaatattttacctgaagaatcgactaatttacgtccctggtcatcacgtttccaagcacgtccccgaatgactccataaggcataccttcttccaacatgatactgacattacttgatttcaataattgcacattaggatttccgtccactaccttaatcacttccgaccgattacgcgcccagttgatattcgcattccattcaaacaatttggtcttgaccggagtagcagacaacacaacttcccatccttgattacgtacatgacctgtattcaagaatttaaaactataaccgctaggcaccggcaaagcgactttcgttatcaagtcataggcatcagaacgataataagttacatctacacccaaacgattatggaaaaagcggagatcagctccaagttccaaagaacggttacgttccggcaaaagttgatcattatttaaagttgtactaatggtttgcaaaggtgaaccattataaatgctacccaacttataggtttgattaatccgataggggtctgtgtcagaaccggcataagcaaaagaagcacgaatcttaccgaacgacaagataggtgatttgatcttaaatgcatcggtaaaaataaacgtagcaccaaaagaaggataaaaataagagcaattatccagtggtaaagtagacgaccagtcattgcgggccgttacatctaaataaacataactattgtaacctaatgacaccgagccgtaggcagaacggattatcttcttagattgcagttgagtggcactaggatactcattcgagttagaaatattcttgaaatcaggaaccaatatgctattcacgctttccgttcttttctccgagttgcgttcatatcggctaataccggcaatggcattgactgatattttatgaaatgttttattatacatcaataaagcttcaaagttagtagaagtactgttattgatccagttcttcataccaccgtccacatcactacgtgcacccagattaaagaactccattcctttccaccaataagcatccagtccggctttacctaccgccttcaagcccggaagtaattttacttccagattcatcgatccgctcaccctgtcacgcgtgtcagagttcgtattttcataaatattccaatacggattataaccacgttcaccaatcggaatcatttcatttccattttcatccttataatgtttcaatacatcaatagaaagcgaacggggaagagtaacaaacgcatatataggattcttatccgaaccattcatatattgacggttgtctaccttttcatgtgagtaagtcattttagaatctaaagtcatccatttggtaatcgtattcatcaaccggagattgaatatatctttaaagctttcattgataccgtgtactacactattacccttacttctcgtatacgatacgcgataattattctttttcgaaccaccttccacagccaatgtatgtgtgtaccgatgggcggtttcgtagaaatccttcacattgtccggatgtgaagaatgagtagtaagtacaccgtcatgtccatagataacctgatcccacaaaggcgctccccagctacgcaatttagcacctgcagaagaattataaccactgaaattcggtaaatctgtttgcaacctgttaccattaggttgaagtgtcagtttatggtcaagcaaataagagttctctcctgttccccaaccattctgataatctaaaaactggttcactttttcaaattgaaaatttccgctataagatacttttgttttttcgaatgtgctcgaacgtttagtggttaccaatacaactccctgtgctgcacgcgaaccataaagtgcagctgcattcggtcctttcaggatttcaatgctttcaatatcatccggattgatatccgctaccggattaccaaggtcggtagaacctgtaccaccatcaacggtcacacttgtatcacccggttcgttttcaataatcataccatcaatcacgaatacgggctgtgagttttcagtcagtgagcttgttccgcgaatgacaatacgcgcactaccattgctcgttcccggaggagtaatggtaacccccgccaccttaccggaaagagaagatatcagattgccactactattttctgccaaggcttccgcatttacactctgccgtgaataattaagactcttagcttcacgcgtcactccgagagcggtaacaaccacttcatcaagagccttcgccgtgctggccaaagatacattgatatgagtcaaaccggtaattttagccgttttcgtctccattccgacatacgaaaatttcaattcttgacatccattaggcacatgaagtgtaaacgtaccatttatatcggtaattgtacctaccgatttagcattcgtcttaccatccggatcaacagctaccaccgtagctcctatgataggcattccatccgcagcatctgtcactttacccgttatacgctttccttgcgcataacccgatacacttattactaaaaagaataagaataggaagtagtttttcataatacttaattattaaattaaagaatacagtattgattaatgcattaaagatgaaccaaagatattttatggtgattaatattagattaatattctcttaatggcgagactttacaaaaaaaatatttgtagaagatagattttaaggttacattaagttttcattaatcaaactactatatatttacagcaaatctaattaaaaccatcgaaaaataaaaaaatctgtttatgtacaagagaaaattcattccgttagtactgttaatgattttaatcgtcaatggatgcagcaacaagcaagaggtagtgtcaactccggttgactatgtaaatccttatatggggaatatcagtcatttgttagttcctacttacccaactgtccatcttcccaatagtatgctccgcatctatccggaaagagcagattacacttctgataaaataaaaggcttaccggtcattgtcagctcgcatcggggaaagtctgcattcagcctgtctttctatcagggagcagagagcggattacaaccggtatattactattgttatgataatgaagtgataaaaccctattcctattcttcctattttgaagaagaagaggtttccactaaattcgctccttcccaccaggcaggaatctatgaactaagtttccggaaaaacgatgctccatatttaatacttagtaccaccaatggtgagcttaaaactacggagaataccatttccggctatcagaacatagatcatcaaaccaaagtatatgtttatatggagacttccgcactgccggaaaaaacgatgactgtcagcaaagaagaaataaatcacagccacactgccataaaaggcaagaacgtgggtatcgctctcttatattcaacagatataaaaacaatcaaagttcgctacggcatttccttcattgatgaaaagcaagcaaaagccaacctacagcgggaaataaaagattatgatgtagaaaaccagatgaacattgccaaaaacatctggaaccaaacattaagtaaaatcaaagtggaaggaatagacgaaaatgcaaaagcaatattctatacttccctctaccggacttacgaacggatgatttgcctttcggaagacaaccgctattacagtgctttcgacaatagtatccacaaagattctgtcccattttataccgacgattggatttgggacacgtatagagcagtccaccccttacgtgttatcatcgaaccagaaatggaagctgacatgattcagtcttttatcagaatggcacaacaaatggaacataactggatgcctacatttcctgaagttacgggagacagccgtagaatgaattccaatcacggtgtagccactgttattgattcatatataaaaggaatccgtaactttgatttatcagctgcttacgaagcctgcaaacttggtattacagaaaaaacgttagccccgtggtcaggcataaagggaggtgaaatcacaaaattctattgggaaaacggatatttaccggcattggcaccgggagaacaagaaacagctgacgaagtacacccatttgaaaaacgccaaccagtagccgtcactctaggtacgtcttacgatgaatggtgtctggcacaaatagccaaacaacttgggtatgagaaagactataactactttctacaagggagtaaaaactatcggaatattttcaatcctgaaacaaaatttttccatcccaaaaatgcaaaaggcaaattcatagaaccctttgattatgccactgccggtggattaggtgctcgtgaagcatacggcgagaataacggttggatataccgatgggatgttccccataatattgctgatttaattgaactgatgggagggaaagaagcattcagaaataatcttgaaacgatgtataacaccccattgggcgaagccaaatatgtattttatgcgcaattaccggatcatacgggtaatgtaggtcaattttcaatggctaacgaacccagtatgcacattccttatctgtacaactatataggagagccctggagaactcaaaaaagagtaaggacattgctcgatgaatggtttagaaatgacctgatgggactcccgggcgacgaagatggcggaggaatgtcagcatttgtagtcttctccatgctaggtttctatcctattactcctggtttgcctatttatgtcatcggaactcctatgttcgaaagagcagttattgaaacaggagccggcaaatcattcgaagtcattgcgcacaactattcgccgacaaataaatatatccaatcagccaaattaaatggcaaagattggaaccaatcctggttcgaacataaagaactgatgaatggcggcaaactggaatttacaatgggaaacactcccaataagaattgggcggcagacagtgtacccccttcttttgaaatgaataaataacagaatatgaataaaatattatttgtccttttatcgcttttgacttctctgcaatcatactcccaagagcaaaatgaaaaagaagtttcatttctcttgttaggagatatacactatgatttactggaagatcacgatatggaatggttatccaccaaaccggatgatctgcgccaagttaccaaagaatattcagtattcacgaaaaatacatggccggaattctcccggataatcagcgggcaagttcaaaaacaccagccgtcaataaaagccgttctgcaaatgggggacttgtcagaaggattggccggttctccacaaaaagcaatacagatggctaacagtgcctttaaagctgtcaacaaaatgaatctgaaagtacctttcattatgactaaaggtaatcatgatatcacagggccaggggctaaagaagcttttgaaaaagtatacttacccaatatggcaaagttggcaggacatccatccttacagtcagccaattacactactactcttgatgatgtattatttgtgtgttatgatccatgggatcggaatccggaagggctacaacaattagaaaagtcactagccggctcgaaggcaacttacaagtttgtcatgttacacgagcctgtgattccggtaaacgaaagatgctggcatgtattccgacaagataatgccaagagggaacaattgctgcaaatcattgccagtcaacaagcaatcgtgctctgtgcacatctgcatctatactccgttgtctgtcgggacactccttggggacctatcgttcagattctcgtcaacagtgtcatcaaagataaaaatatactggttccgaaaaatgtagttgcagactatggtcctgaatttgtaacggcacacccacaatggcaaccttctactctacaacagcgtatggaatggattgataaagaaactccccatatccgttttttcaaacaaatggatttaccgggctacggcatcctttctattaacaaagaaaacaacaagatgcaattagaatattatgccgcatttggagaaaagccatacgatacagtcaacatatccgaattacttacttctaattaaaaacatattagccatgaatgtaaaatttaaagctcatttatttattttctccttattcttttgctataatctatcagcacaagaaatcgtcaaaggagattttaagaacgaaaatccacaaagttcgtatgttccttcatttgacatggatgctaccgacagaccagtgaagaatgtcatcttaatgataggtgacggcatgggactggcacatatctgttcaggaatgtatgccaatcaaggacagcttactatcactaatttaaaaacatgcggtttcgtcagaacgcaatccgccaacaagtttacaacagattcagctgcttccggaactgcttactcaaccggaaaaaaaactaaaaacggagcgctcggaatggatgaaaataaccaagttattcccaacttaccggagaagttatccggctatggctacatttcaggaatcgttaccactgacaatctcgacggagccactcctgctgctttctttgctcaccaaccggaacgtggaatgtctaaagaaatttgggcggatctccctaacagtaagctgacattcttttctgccggtagttatgaactatttgaaaaacaagcaccaaacgttcaaaaggaaatcaaaaaagagtttaccatcatagaagagccgaatgacaaagctatcaagaaatctaaaaaactgggatatttacccacaaagagcaaaacggcttctgtaaacgaaaaccggggagatttccttccgtctaccacccaaatggctattgactatctttcgagcaggagtactaacggtttcttcttaatggtagaaggtgcccgaatagataaaagtgcgcacagcaatgattattcggcagttgtccgtgaagtattggactttgacaaggcggtagaagctgctatcagatttgcagaaaaagatggaaatacattagtgattatttcagctgatcatgaaaccggagcattagctttacgtgacggaaacataaaagaaggcaaaatgaaagcaatgtttgtatctaaaggacatacaccaatcatggttccactgtttgcatacggtccacaatccaagctttttggcggtgttcaggaaaacagcgatgttagtaataaaattctccaattactcgctaaataagatataaaacagatctgtcattcaaactgaaataagaaagaatttcttatttgcatatagaaaaaattctttcttatttcttttctgcctgatagactccaaaaataatgcaacctgctcccaataatgtaatccacgtgattttttcgtggagaatgataaccgaagctaccatagtcaccaacggattgagatagatataattggaggctctaacggttcccaactgtttcaataccacattccaaaggacataacaaaccaaggatgccaggacggccagaaataagagattggataatacaaccggttttaaaagtacatctaaatccggttgcaacggatgaagaagaaaggcgggaagtatggtcaatactccataaaagaatattttgcgggtgataaatacagtggggtaacgccctgtcattttctttatcaccaaactataaaatgcccacgacagggcagcaagtaaagtaagcaaatcccctaccggagataatttaagtacaaaactgccgttaaagaccaccagtcccactccgattaaagctaatatggaaccataaatcaaacctttggtggctttttcactcttataaaagagaagggaaagaatggtggtaagtaaaggagctgtgcaaatgatgaaagctacattagatgcttgcgtaattcctaaagctgtattctcggtaaagaaatagagtgagccaccgaaaagacctcctgccatcaaccaaagttcgtctttccagttactcgtaaacagacgtttgggggaaatcacccaaatgcccagataagcaataagaaaacgatagaagaatatctcctgaggggtcagtccgtgattaatcagtactttggttgatataaaggtcagtccccagatagcaactacaagtatcgcaatcagatggtaatatccatgcttcaattccataatggtggtgatgtttgtttaatagagtgcaaagatagcgagaagttatggaatgtttgtttggagaagtaacaaaaagcccgtacctttgtttatgttcaaagaaagttcctaaaataaggtataagttatggaaaaatatatagcaccggacaggaaacgtatcccatacggcatgatgaactttgcagtaatccgccgcgacgactgttattatgtggacaaaacccggtttatacccatgatagaagaggcggacaagtttttcttctttattcgtccgcgccgtttcggcaaaagcctcactgtaaatatgttgcagcactattatgatatacttgccaaggataagttcgatgccctgtttggcgacctttacattgggaagcaccctacgcgcgaccgaaacagctatctggtactatacctcaacttctccggaatagtaggcgaactgcacaactaccgcaaaggactggacgcgcattgccaaacaatgttcgactatttctgtgacatttacgccgactatctccccaaaggcatcaaggaagaactcgacaaaaaagaaggagctgtcgaacaatttgaatacctgttcacagaatgtaataagaccaaccaacgtatttacctctttattgacgaatacgaccatttcaccaatgccatcctctcggatatagaaagcctgcatcgctatacggacgaaacacatggcgaaggttatctgcgcgccttcttcaataaaattaaagccggaacctattccagtatcgagcgttgtttcattaccggtgtaagccccgtgacaatggacgacctcacaagtggtttcaatatcggaaccaactactcgctcacaccggaattcaacgagatgataggtttcacggaagaagaagtgcgccaaatgctcacttactattccaccaccagtccattcaaccacagtgtggacgaactgatagaaataatgaaaccttggtatgacaactactgctttgcggaagaatgttatggtgaaaccactatgtacaactctaatatggtactctacttcgtcaagaattatattcaacgaggcaaagccccccgggatatggtagaagacaatatccgtatcgactacgaaaaattacgtatgctcatccggaaggacaaagagtttgcccatgatgcctccatcatacagacattggtgagcgaaggctacgtcaccggagaactgaaaaaaggttttcctgccgtcaatattaccaaccccgacaactttgtgagcctgctctactatttcggtatgctcaccattagcggcacgtatgaaggaaggaccaaactcaccatccccaatcaggtagtccgcgaacaaatatacacctatctgctgagtacctacaacgaagccgaactcaatttcagcagttacgaaaaaaacgaacttgccagcgctcttgcctaccgaggcgactggaaagcctatttcggttatattgccgactgcctgaaacgttacacttcccagcgtgacaaacagaaaggtgaatttttcgtccacggctttacgcttgccatgacggcacaaaatcgtttctaccgtcccatttccgaacaggacacacaagcaggttatgtcgatattttcctctgtccgctactggatatctattccgacatgaagcacagctacattgtggaactgaagtatgccaagtataaagatcccgaaagccgcgtggaagaactgcgacaggaagctattgcacaagccaatcgctatgctgacactgatacggtaaagagagcagtcggcactacacaacttcataagattgtggtggtatacaaaggaatggatatgccgatatgtgaagaggtttaacagataggctaacaatatgaaaagatcaataaaacgtttgcccaaacgcacgcaagaagagttggcggtgttacaagagctgatattgtcgaatcttacgaatgtgcgtatgattatcttgtatggaagttatgcgcggggaaaatatgtcatctgggatgaaacatacgatgaacgtggagtaactacttactaccaaagtgatttggatattctggtgatatgtgatacgagagacgcaaataaagcagagaggcatgcgcgcgaagtgatcgttcctaaatatgatacaagaatggaaggaaagcggcatccggcaccgcctaatattattgtagaaactccagtgaccattaatagagctataagaaggaagcattatttcttttatgagattataaaagacggtattctgttgtatgacgacggcacgtttcagattggcaaaccggagaagttgccgtatcgggagattaagcaatatgcagaggaagaatatgcagaatgttttcctttagcagaaggattcttaagacatggacatttggataaagaagaagagaattataaactaggttcatttgaattacatcaagcctgcgaacgttactacaaaacgtttacgctcgtgtatagcggcattcgccctaaatctcatgaattgaaagtgctgggagcaatggtcaggagctgttcacgagaattcgcaaatgtgtttccaactcatactttcgaagataataaagcatttgataaattatgcagagcatatatcgaagcccgatataatcgactgttcaccgttagcaaagagcaatacgagtatatgctggcacgaacagaggtgctccgcgaagtaactattcgggaatgtgccgcacgcatggcgtattacgatgagatgatagaaaaagaagagaaagagaagatataaaccgtatattgtaaaaatgaataattaccctcatcacagatagctgtaatgagggtaatcacgttaaaaagagagtttctacacatctccttaatatcaatttctacatgagaaactatcgcaattacatactttatttagtcaccttgtaagttccacttccatactcctttgacttcacctctccaggaagagttacggtagcggtaacacccttaggaatggtgaattcccaaatccaggtgtctccttcgtatttccaggcgctcttgatgagtccggaggcggaacggtattcggcagtcacgtgtcctaatcgcttgtctggaatgggcttcataatgatatgcttgaagccgggagtagcaggatcggctgcaatgccggcaacggtttcccaaatccattcacatacgcatccgtaggcataatgattgaagctgttcataccgcgtggtcccattcctttgtctatcatatagctgttccaccgttcccaaatggtggtggctccattgtccacagagtatagccagcttgggttcttacgttggaagaggagttcataggcaatgtcttccatgccattctccgtgagggtggccatgaggatggatgtgcccaagaatccggtctgcaagcaaagatcgtgctgtgcgaagttttcacgcaggcggtctatcatcttcgctttgggttcgccttccaaaagctggttctttagggcaaacaaggcaggagtttgcatggtgttgaggatggcggttttgaaggtgccgtcttcgttgaggaagttctctttgatgtatgcctttgccgaatcagccatttgctggtacttggcggcatcgcgaccagtggcggcagccatatctcgcatcatgaaagcatctatcacccagtaggaagcgctcaaatagttccaatagctgacggcatcaggaagcggaccttggggagaaaaagccagtccgctacaactttccagtggttcgtagctcaaccagtcggcccattggtagttgccgttctcaccgcagagagtctcgtggttatacttggtgtcgttgatgtgattcataaacaggtccatggcgtcccagctctcctcgatgatttgcgtatcaccgaattgcttccataccgtccaaggcacgatgattccggcatcggcccaacccaaacgcattttctcatcaccgtattgtgccaagggagccactccggggaatccacccaaactgttttgggtgtcgcgcatgtcacgcatccacttatggaaaaacttcatggtgttagcaaagaacgtaccggtttctgcaaacacttgtgtgtctgctgtccagcccagacgctcgtcgcgttgcggacagtcggtgggtatggacaggtagttggatagctgtccccaataagtgttggagatgagcttgttcacaaggtcgttgcctgtggtgatagtgccggtctccagttcctttgcgatggaagtaacggggatggacttcaacgacttgatggcaacattctcggtggcagttatggagacgtagcggtagccgaaaaaggtgcagtgaggataataggccacatagttatctccgccagcaaaggtataatccagacggataccggtgtgggggatgcgcaggttttcgcgatggcagcttccttccggaccgtccatgccacgaatcttggcgccgttgccgtcattgagcagctctgcagggaggcaggtcagcaccgttccctcggcggctttgaatacgaaagaaggtacgccggcacaattttgtccgaagtccaccactaacgtctctcccggatttacgttcatttccgtacccgatgcgaactcacgggcgataattaccttaccgaactcattctcctttgctccttctacattcttccaaacgtatgctttgacaggagcaagtgcgagatcagtacgcagataaacttccgctccatccgaaggcaggatatcgccagagaattcggtgttctcttcgggggtggagagtttctccacgcattcgtagcccatcggctcgcgtgcatcatactcttctccgtcaaagataccagcatgtttcactggaccggcaattccggctttccagtttttaagatcagtaccgtaacgctttttgcttccgtcagaaaaagtcagttccagtacaccacggaaggcacatttcttgcctatcataccgtcatatcctccaggggttatgattttgtcaccccaccatcccggcgtcacctgtacggagagcatgttctcggcgtttggcttggtacggatgatgtctgtaatatcataggtgaaagaacgtttggtcttggcatagtgtgtgaagcccggtttcagaaattcctcgcctacgggtttcccattcacatacaactcgtaaactcccagtccagcggtcatccacttggcagagacaattttctgttcgtttttcacggtggacacgaaccaactcgctccatcggctgcgcgaccgttgttatgtcctttcactacaggggcgtttactgcggaaatccatttggattcgttccaggctgatgcttccaatgcgtcagtacgttttccgacttcggttgcgtttatcagtccgctattcgagaaaagcgcgagaatcattatcgggataagattcgcaaaacaatgaagattcattttcatacttatatgtattttttagtattaaaagattaacttagaaatactgttttagttttacggggcttgcacaacaaaattacagaattatatgatatgacagacgatttctgcattttttttgactcaatgatggtttctatttaatccggaactgactcataagtccgatctgattgaacagacgacaggagctttgtacattgaatgatcgattatcgagcaaaacaatgatatattgtaaaataatataatcaatacacttattcaggatattgtagtaattatttattgaataagaaaagaagatgccggttattcattgcaatcattctttcttctttacacgaaagcctcgaaatcgaataaactctattcaagtttttaataaataacgaaaaggtttattataaatagtatccaaatttattataaactcttttttgacactttcaatacctgaaatagaattattgcaacaaaaataggcaagaaccttcacagtttcttgcccattcgttatcctcgttatgcaattcgcatattaacctattgaactttatgtaataaaaattatatatttcattgttgtttctttattattattgacctcaaatatacaaaataaaaagaagaaagtcaatagggaaagcgtggttatctgaaaataaacacgtaaatttgtgcctcgaattagaaataacagtataaatcactataaataaaaactttatcactatggagtacaatttcagagaaattgaaaagaagtggcagaaaaggtgggtagaagagaaaacctaccaagttacggaagatgattcgaagcaaaaattttatgtactaaacatgtttccttacccatcaggagctggtctacacgtaggtcatccgctgggatacattgcttcggatatttacgcccgttacaaacgactgcagggcttcaatgtactcaacccaatgggatatgacgcttacggtttgccggcagaacagtatgccatccagaccggacagcatcctgccatcactaccgtcaacaatatcaaccgctaccgcgagcagttggacaaaataggtttctctttcgactggaaccgtgaaatccgtacttgcgacccggaatattatcattggacccaatgggccttccaaaaaatgttcaacagctattattgtaacgatgaacaggaagcccgtcctatcgaagaactggaaaaagccttcgccatctacggaaacgaaggactcaatgccgcttgcagcaaagatatcagctttactgccgaagagtggaacgccaaaagcgaaaaagaaaagcaggaagtcctgatgaactatcgcatcgcttatctgggtgaaacaatggtaaactggtgtgccgaattaggaactgtactggctaacgacgaagtagtagacggagtcagcgaacgtggcggttttcctgttatccagaagaaaatgcgccaatggtgtctgcgtgtatctgcgtatgcacaacgtttgcttgacggattagatacgatcgaatggacagattctctgaaagaaacccaaagaaactggatcggacgttcggaaggtgctgaagtgcaattcaaagtaaaagacagtgaccttgaattcactatttttaccactcgtgcagataccatgttcggtgttacctttatggtattggctccggaaagtgaattggtggcacagttaacgactcctgaacaaaaagcagaagtagacgcctacctcgatcgtaccaaaaaacgtacggaacgcgaacgtattgccgaccgtagtgttaccggtgtgttcagtggttcgtatgctattaatccgttcacaggtgaagcagtgcctgtatggatcagcgattacgtactagccggatacggaacaggagctattatggctgtacctgctcatgatagccgcgactatgcatttgccaaacatttcggattggaaatccgtccgttggtagaaggttgtgatgttagcgaagaaagtttcgatgcaaaagaaggtattgtttgcaattctccacgtcttgatgtcactccttactgtgatctttctctgaacggactgactatcaaagaagcgatagaaacaaccaagaaatatgtaaaagagcacaatctgggtcgtgtgaaagtgaactaccgtctgcgtgacgctattttctctcgccaacgttactggggtgagccgttccctgtttactacaaagacggaatgccttatatgatcgacgaagccagcctgccgctggaacttccggaagtcgctaaattcctgcctaccgaaacaggtgagcctccattgggacacgcaactaaatgggcttgggatacagtaaacaaatgtgtcgtagaaaatgagaagattgaccatgtaaccgtcttcccgctggaactgaacaccatgccgggattcgccggttcttcggcttattatctccgctacatggacccgcataatcatcaggcattagttgatccgaaaattgaccagtactggaaaaatgtagacctatatgtaggtggtaccgaacatgcaacaggccacttgatttattctcgtttttggaataaattcctgtatgacatgggtgtgtctgtaatggaagagccattccaaaagttagtaaaccaaggaatgattcaaggtcgcagtaactttgtatatcgtatcaaagacaccaatactttcgtttcactgaacctgaaagatcagtacgaagttacccctattcacgtagacgtaaatatcgtatctaatgatattttagatttggaagcattcaaagcatggcgtcctgaatataaaacagccgaatttatcctcgaagacggaaaatatgtctgtggatgggcagttgaaaaaatgagtaaatctatgttcaatgtagtcaatccggatatgattgttgagaaatacggtgcggatacacttcgtatgtacgaaatgttcctcggcccggtagaacagtctaaaccgtgggatacaaacggaatcgacggtgtacaccgttttatccgtaaattctggtcattgttctacagccgtacggacgaatatctggtaacggacgaacctgcaacaaaagaagaattgaagagccttcataaattaatcaagaaggtgactggtgatattgaacagttctcttacaatacatctatcagcgcattcatgatttgcgtaaacgaactcttcaacctaaaatgtagcaaaaaagagattctggaacagctcgttatcactctcgctcctttcgctccacatgtctgcgaagagttgtgggatgtattgggacacgaaacttccgtatgcgacgcccaatggcctgcatacaacgaagaatatctgaaagaagatactatcaactataccatctctttcaacggaaaggcacgtttcaatatggaatttgcagcagatgaagcttcggacgctatccaagccgcagtattggccgacgaacgttcacagaagtggattgatggcaagactccgaaaaagatcatcgtcgttccgaaaaagattgtaaacgttgtaatttaaagtattaagtataaaacaataagtattaagtaataagtattaagtattatccgtagtcgttttccaaatatatccgccaggttaatacttaacacttattacttaatacttgaacttaaaatccatgcataaactgacaaaagcggaaataatgagagaagtgaaagattatatctacatcactctcggattgataagctattctttgggatgggcagcattcctgttaccttatcagataactaccggaggaactaccggtatcggagctattatctattatgcaacaggatttccaattcagtggtcatacttcattatcaatgcagttctgatgacgtttgccatccggatattgggtccgaaattcagtataaaaacgacttatgctatttttacgctgacttttctgctttggttattccagttagtggtaaacaattacgtagaagcaccggatatgacgccggacggtaagccgctattgctcggtacaggacaggatttcatggcctgtattattggtgcagccatgtgcggtgtaggcctcggtatcactttcaactacaatggaagtacgggtggaacagatattatcgcagccatcgtcaataaatacaaagatgtatcgcttggacgaatgattatgatttgtgatgtattcattatcagctcctgttactttatatttcatgattggcgccgggttattttcggttttgtcaccctgtttattattggtgttgtgctcgactggattatcaacagtgcccgtcaatcggttcaattcttcatcttctccaagaaatatgatgaaatagccgaccgtatcattaaagacgccgaccggggagtaacggtactcgacggtacgggatggtacagtaaaaacaatgtgaaagtattggtagtacttgccaagaaacgtcagtcactcgaaattttccgtttggtaaaacgcattgatccgaatgcttttatctctcaaagttccgttatcggtgtgtatggcgaaggattcgataagctgaaagtgaaataataaccggttgataagtagtgaacaaccctgttaaaacaaaaaataagatgatgaaacgcaaacttgtatttgctaccaataatgctcataaactggaagaagtggccgctatcctgggagatcaagtagaattattaagtctcaatgatatcggttgccaagcggatattcccgaaactgctgaaacactggaaggaaatgcgttattaaaatcttcctatatctacaaaaactatcatctggattgttttgccgatgatacgggattggaagtggaaaccttgaacggagctcccggagtctattccgcccgctatgcaggaggtgaaggacacgacgcccaggctaatatgctcaaacttcttcacgaactggacggaaaggaaaaccgtaaagcacaattccgcaccgctatttcgttgatactggacggaaaggagtatctctttgaaggagtgataaaaggcgaaataatcaaagaaaaacgcggtgattccggatttggctatgatcctgtattcatgcctgaaggttacgaccggacttttgccgaattgggaaatgatatcaagaaccaaatcagccatcgtgcactggctgtacagaaactttgtgagtttctgcaaagctgattatacatacccacttaaaatataaaacacaatgaagaaaattactttatttactttacttacgctcctattgtgtacttcgtgtgtaacaaaaaagaagttcatgcttgcagagatggcagccaccgcaagcaaagacagtctgcaagggttgttggataactcccgcgaagttggtaaccagctatcggcacaagtcaaaaacctcttgcgtgatacgaccaagatggggaacagtatccgccagtatcagagtatgttgaatgtcaacatgaccgaacaggaaaaactgaatgccctgttgagccagaagaaaaacgagctgaacgaaagagaacgcacgatcaatgaattgcaggacatgattaaggcgcagaatgataaggtacaaaatctcttgagtaatgtaaaagacgcattacttggttttagtactgacgaactgaccgtccgcgagaaagacggaaaagtatatgtagcgatgtccgacaaattattattccagtcaggaagtgcccgcctggataaacgtggagaggaagctctcggcaaactggccgaagtgctgaacaaacagacggatatcgacgtatttatcgaaggacatacggacaacaaaccgatcaatactgtacaattcaaagataactgggatttgagtgtgatccgtgccacttccgtagttcgtatcctcatcaagaattacaacgtaaatcctttgcagattcagcctagcggccgcggtgaatatatgcctgttgatgataacgaaacaatagaaggaagaagcaagaatcgccgtacggagattatcatggctccgaaactggataagttgttccagatgcttcaaagttcggaagaatccaaataaaaaataattgattcaataatcaacaataaaaaatcctctcggttaataaactgggaggatttttttatctttaaagaattgaattattttaagacagtttctaactgttattcattcaagaacaataataaaaaccaaatttctttataatcccaacttagccgaaatctccaacattcgttgaatcggcttcactgccttcttagccacctccggatctaccgtaatttccggtgcttcattcttcagacactcatagagcttctctaacgtattcaaccgcatgaaactacactcgttacatccgcacgtactatcgttcggaggagcaggaataaacgtcgtctgcggacacttcttttgcatctcatgcaagatacccgattcagtagccacaatatacatgttttccgggtggttcacggcatacttcaacaaagcagctgtagatcctaccacatcagccaatttcaaaaccgtactcttacattcgggatgtgccaagaccaacgcttccggatgctgcgctttcaattccacaatcttttcaacagagaactgttcatgcacgtgacaggctccgtcccaaagcaacatattcctgttcgtaacagagttgatataattacccaaattcctatccggaccaaaaattattttctcatctttggggaagctttccacgatctgcttcgcattggtggaagtcaccaccacatctgtcactgctttcacggcagctgtcgtgttgacgtacgaaataacggtgtatcccgggtgctctttgacaaactgtgcaaactgatccgccggacaactgtccgccaacgaacaacctgccgccatgtcgggtaccaacactttcttgtccggacaaagcacctttgccgtttcccccataaagtgaacgccacacatcacaataatgtccgcttccgttttggctgcccattgagccaatgccaaactgtcgccaacgtaatcggcgatgtcttgtatttcccccttctggtagtagtggcccagaatgattgcattcttttctttctttagctcgttaatagcctttatgagttcattcataataatattcttatttctttccttttaaaaaaaatcctttgttagtgatgatagcctgttaataatgttagcaaataaatacgatttttcttgccggataagttattagtccatacttctgctttatgagtcggttatgaactgatataaagggcaagatatcctattctacttgcttcattatcaatgaaagcatcgttaaatgccgtcaaatggaagtttgctattaactccctgttgataaagtgcaaagttaaaaactttatggatataaacaggcagataagtgctgaaaaatatgtttatgtctgtgtagaaagttttgggttagttttttggaatgttcataatgaaggcctcttatatcttcttttgaataatgcaagaattatttttcaaaatctttgccgatagttttgacaggttttaaaccgttatcaacaccttgttaactgaaaagaattacctttgtggacaagaacataataaaagaaaagacgtatgcgtaaactgaaaataacagagctgaaccgtatcagtgccgaagagtttaaacaggttgaaaaactgcctctggtggtagtgctggatgatattcgtagtttgcataatataggttctgtgttccgtacttcggatgctttccgtattgaatgtatctatctgtgtggtataacagctaccccaccgcaccctgaaatgcataagactgcgctgggtgcagagttcactgtcgactggaagtatgttaataacgctgttgatgctgttgataacctcaaaaatgaagggtatatcgtttattctgtagagcaggcggaaggaagcatcatgcttgatgaactccagctggataaaaccaagaagtacgctatcgttatgggaaacgaagtgaaaggggtacagcaggaggttattaaccattcggatggctgtatagagattcctcaatatggtacaaaacattcgttgaatgtttctgtaactactggtattgtgatttgggatttgttcaaaaagttacactaatagtcataatacaggattggttaataagttgtttataacgagttaatagcttagttaattcatttataatcaataactatgttctgtttataactatatggagccatgttgattctatgggtgttgggtagttattattatagttgttgatagttcgttttcaggctgttgatacttgagttgtcaggtattaacagcttatatgatacatattaatagctgggaactcaagtattaacttctgagaaaccggaaattaataccttacaggaagtttgttaattcttgaaatgataactagtatggttgagtagtgatcaattggttatgaggttgataaacttataagccgattgattttagatttgtccgttctccaccatcaacactacacgttctgttagtttgtcctcaccttgcggatcatattctttttttaaactggctccgaacaatgcagcaaaagtctgatagaatcccgctttgaaaggtcccataaatgctttcaccagttcataactggtagaattgctttggcggtctattaatttaatcaacagtttcccctgtgcaaacgatagttttttcattcggggagtatattgatctttcaatcctttttcaacccgtttgatatgtttttggcgggctttctcattgggcaaagtctgaagatattcgtaagtttcaatgatggcctgattaatttctctggagataggatatacctttttcacattgcgaatcagtcggtaatattcctgacgttccttttcatttttgaatttcaacggacggaaaatatacacagttcttaactggacacatggaatggtatctccattgtagatacacatcggaaccaaatatccattgatgctttgtttatcttgagcttgcaggcgcaacgaacaacaaacaatagcaaacagcgtcattactactatgttaagcctctttttcacgatacaaaaatagaattaaaattttattattcagacatttctcttcgatgttaacctatttaaagtatctttgcggccttatctgttaaaaaagcaggaagaataaaccattttattgatgaaaactattcaacttttacggttgataagtattataaacagcctgttaataattcctgcttgtagtgctcaaaacccttccgaaagtcttttagaagatgttcttgaagatttatctgttaataacggaactgataactctgttaatactcctaattgggaaaatgaattggaagaactttccaatcgtatgcaggaaccagttaatttgaatgttgctacccgtgaacaactcgaacagtttcctttccttagtgatattcagattgaacatctgctggcctacatctatatacacggacagatgaaaaccatctatgaacttcaactggtagaagagatggataggcaaacaatccagtatttactaccttttgtctgtataaaagctattaacaatgaacctgcttttcggtggaaaagtctgttgaaaagcgcagcaaagtatggaaagaatgagctgttaactcgctttgatataccattttataggcgaaaaggttatgaacatacctatttaggaccttctgtttataactctgtgaaatacagtttccgatacagtgaccgactctatgcaggagtcgttgctgaaaaagatgctggagaaccttttggagctttacacaatcgctacggctatgattattattccttttatctgttattaaaagattgtggacgattaaaagcattagctgttggtaactatcggcttagtttcggacaaggattagtgattagcactgattatctgatgggaaaaacaatctacgcctcttctttcaacagccgtagtagcgggataaagaaacattcttctaccgacgaatacaactatttccgaggagtagctgccactgtttctttagcaaaagattgggatatttccggtttctattcacaccgttcattagatggagtaatcacagacggagcaatcacctctatctataaaaccgggctacatcgaagtcaaaaggaagcagataaaaagaacctgttcaccatgcaattaacaggtggaaacgtgagttatcaacacaaccgtatccgactgggtatcaccggtatttactaccttttcaaccgaccttatgaaccggaattaacaggctattccaaatacaatcttcatggaaacaacttctataatctgggaatagagtatgcttatcgctggcatcgtttttcttttcaaggagagacggccataggaaaacaaggttgggcctctttgaaccgtttgcagtattcaccggttcaaaacactcaaatcatgttgatacaccggttttattcttataactattgggccatgtttgcccattcttttggtgaaggaagtacgacacaaaatgaacagggatattatatcggcatggagacttctccttttgcctattggaaattcttcgcctcattcgatttattttcttttccgtggaaaaaatacagagtaaataaaccctctcgcggaacagatggattgcttcaagccactttcactccacgcagccatctatccatgtatctgaagtaccgctataaacgcaaggaacgggattggacaggtagtaaaggaacactaacacttcctatttttcaccatcaacttcgttatcgtttgaactattctttaggagatgtgttaagcagtcgtacaactttagattataatcattttcattctcaggacagagctgctaatataggatatcaggttacacaaatgatatcctcccaactgccttgggccaggctgtttgctgacgttcagggcagttacttttttacagacgattatgattcgcgtgtatatgcttcggaaagcggattgctttatatgttttacacaccgtccttccaaggttgtggatttcgctgctccgttcgtttcagatatgaactgaataagcactggttgttcataaccaagtttggcgaaacagtctatttagaccggaatgagatcggttcgggcaatgatttgatctgtggaaataaaaaagcagatgtacaaatgcaactgcgtattaagttttaatgtatatttgtctgccagaaataacagaagaatacgatattaaatggatgacagggctacttttgacaaaatgtttaatgaatggtatgcacagtttgtatattttgcatattattttataaatgacgctgaggtatgcagagatatcgtaagtgatgcttttgagtatttgtggcgtaattatgaaaagatagaagaagcgacggctaaaacttatctttatacaatcattcgtacacgttgcattgactatcttcgcaagcaaaatatccatgaagaatatgtagagttcacttcgcaattaactgataaaatgatagaagtcgattcacaacattctgattctcgtgttttgcgtattcgtaaagctatggaaaagttgactccttataattatcatatattggaagcatgctatattcataataagaaatataaagaagtggccgaagaattgaatgtaagtgttgcggctattcataagaatatagtaaaggctttgcgtattcttcgcgaagaattggggcaagagggtaaccggaatagactttaaaacgtaaatatatatattgaatacattatttatggatgaaaagaatataaatataagtaagtcggaagaagaactcctggaaattatggagaatcgttctcatataactgctgatcaattacataatttgaaagaagatgaggagtgcttgcaagcatgttctgatttggcagaaattgtgatagagatgcagaaaaaacaaaatatgctggcaattgatgtccggaatgaactggcagattttcataataaacattctaaaaacgatcgaagaaaaaatacacgcatactgttgtgggccagtatcacaggtgtagcggcaactgttgtcataattttagttttgcgtgcaatgatgatttcgtcgcaaccggaaatcattcaagtgtttcaagccaatcatgttgcccaacaagtcactttacaagtgaatgatgagaaagaagtaaagccactgaaagaagtagtagaatctttttcgtcttcttccgctgcacagttgtcttctaaagaaatagattatagtcgcgctcttcttcaaacagaaactaaggaagtgggaaagcagagaatacagatacatagattaagtattcccaggggagagacattcaaagttgttttatccgaaggaaccgaagtcttcttgaattcagacagccgattagcttaccctacgatttttaaaggaaaagaaagagtcgtctctttgggaggtgaagcttattttaaagttactaaagatgcagaacatccttttattgtgaaaagtggaaatatacaggttcgcgtattaggaacggaatttaatgtgcgtagctactctcctactgacgttcgtgttacgctcattacaggaaaagtggctgttagcgatacttgtggagttcatagtgttgaaatgatgccgggacaaagtgcacaactttcttctaacggaacatttgctgtgaaagaggtggatattgaatcatttttatattggaaggaaggatttttctattttgacgatgttgctctggttgacatgatgaaagaaatagggcgttggtataatatagatattgagttccgcaacagcaaaattatggatcttcgtatgcatttctttgcaaatcgtcatcaagacatctttcacttgattgaattattgaatcgaatggagagaatacatgcttattttgaagcaggaaaactaattatcgaataaaaagcaagcaaaaagatataaatctgaatagaaaaatatatttctgaaaaaaaactcttttaagggtaaccattcttttttaaacttcgtatacaattaaaagaatgaaatattatttaactattcaggcttatgaaaaagaatcaagcacaaaagttcattgttttattcttgtttttcctttttgcttattcatggcgtgttgaagcacaaacaggtaaggaaaagcaactaacaatggagtttaaaaatgaagggttgccctctatttttaaacgttttgaaaaggtatcgggatataaagtgctttttatctacgatgaaatcagttcttatacttctacaggaaaagtagaaaaagctacagttgatgaagcattgaaagtgattattggaaaaaacccgttaaaataccacattgacggacaattcataaatatcacaaaaaaagattctaagaagtttttctcacaagtaaagggaaaagttttttccgaggaagacggacttccggttattggtgccactattatagtggaaggtcctagtaatatccgtactattacagataataatggtaattttcagctctctgatgttccgaaagatagccgagtcagaatatcgtatgtaggtttggaaacccagttcttgaatccttcatcctatatgtcggtagtgatgaagtctgatacaaaggcgctggatgaggtagtggtgacaggtctgttcaataggaagaaagagggattcaccggttctgctgttactatcaagggtgaagacctgaaaaaatatagtacgaataatgtggctaaagcgatagctgctgtcgctcccgggcttcgcatcatggataatataaatatggggtctaatccgaataatctgcctgatatgcgtatgcgtggcggtgcaaatatggatatggctacacagtctgcggtagattttaattctaccagtaatgacgtattagcagttcagggcgaatatgagacctatgccaatcaaccgctgcttatcatggacggatttgaaatcaccatacagacacttgccgatatggatcccgaccgtgttgcttctattgttgtgttgaaagatgcggcagctacagctatttacggctcgcgtgcggcaaatggagtaattgttatcgaaagcaagactcccaaaccgggacggatttgggtgacttatggtggggaacttcgtattgaagctccggatatgaccggatataatttaatgaatgcaagagagaagatagacgcagagttgcaaagcgggctttatacatacggtggcgagacagttgaaaaatggcagctctatcaatctaaattgcgtgaagtgctggcaggagtaaatacttattggctggacaagcctttgcaaacagctttccaacaacgacatacggttacgttggaaggtggtgacgaagccttgcgttatcggatgtatgtcggatataatagttctccgggtgtgatgaaagacagtaagcgtgatgtattgaccggttcacttgattttcagtatcgcctgaaaaaagtgttgttaaagaatagcattacgttggataattcggtggctaatgagtctccgtggggaagttttagtgaatatacccgcttgaatccttatctgcgtccatatggagagaacggagaaatacaaaaacggcttgataatttcgaaggagtgggtggtgagtcgagctacctgaatccgatgtataatacgacattcaacagtaaagaccaaagtaaaaactttacagtacgtgaacttttcaaggtggaatataatcctactaatgaattacggtttgaaggagcttttaatctgtccaagagcgtaggacatcgtgatatttttcgtcctgcacaacatacgctttttgataatgtgactgatcctaccttaagaggtgattaccgcagaagtcagagcgaagctgtcaattggggcatagatttaacaggaagctggaataagcaactggaagatcactacctgactgctaatgcacgtatgagtgtattggagaataattcggagacttatggaaactatgtgactggtttcccgaatgataatatggataacttgttgtttggtaagaaatataatgagaaggtgacaggagatgagaggacaacgcgctccattggttgggtagctgctggaggctattcttataaatataagtattcgttcgactttaatatacgcttggacggttcatcacagtttggaaaaaataaccgttgggctcctttctggtcaaccggattacgttgggatttgaaaaaagagaactttttgaaagatgtatcttttatttccgatttcattttgaggggtacatacggtacgaccggttcccaaggttttgatccttatcaggcacatggttattatacatattccaatttactgcttccttattactcgtcggatgcaacaggttcggaaatcttggctatgcataatgaaagtttaaaatggcagactacaaaaagtactaatcttgccttggaactcggttttttcgatcagcgttttactgcacgtgtggaatattatcggaaaataacagataatatggttgccaatataagtcttgctccttctcttggtttcagcagttatccggaaaatctgggaaagatagagaataagggttgggaaatttctctctcggctattccttataaaaacactgctaaacaagcttattggacaattacagtaaacggttctcataatactgacaaactattgaaaatatcggaagcgatgaaatacagaaatgataaaagtgcatcagatttaaaagatacgccgttgccacgttatgaagaaggtgaatctctttcccgtatttgggtagtacgttcattaggtattgatccggcttccggagatgaaatattattgaaacgtaacggggagatgacgagtgccgttaactggagtgcgaatgatgtagtacctattggtaatacagaacctaaatggcaaggatatattaattcttcctttacatacagaggttggggagcagatgtcagcttcaggtatcagtttggcggtcaggtatataatcagaccttgcttgacaaggtggaaaatgctaatttgaaatataatgtagatcgacgggtaactcagctacgttgggcgaaaccgggtgataaggcacagttccgtgttcttaatcctaacggtttggaaacgaaagccacttcccggtttataatggatgaaaatatattccagggaagttcgttgtctgtttactatcgtatggatcgtactaatacaaaatttattagtcattggggattgagttccgctaaagtgacgtttaatatggaagactttttctattggtctacagtgaaacgcgaaagaggtttgtactatccgtattcccgtcagtttacatttgctctgaatgttgctttctaattaaaaacctatttgtatgaaacagataatatatatactattaacaacaacaatgctgggacttatgtcttgcagcgactggttggatgtatctccgaagacttctattcctaccgacaagcaatttgagtcggaatcaggatttaaggatgcgcttacaggtatttatttgaagttgggaaccacgacattatatgccggagacttgacttatgcttatttggatgagttggcaggattatattccgattatccggggtataatacaaatgctgttttcgaccaaagtatcgtgttcgattatgagaacatgtttttgagtaagaagaatgggatttactcaacgatgtataacatcatagccaatattaataacttcttggagtacgtagacaaaaataaagatgttttagttaccgaacgctattatgaaactatgaagggagaggcactcgggcttcgcgcttttcttcactttgatttgttgcgtatgttcggtcctgtttataaagaacatcctgcatccaaagctataccctaccgtattgcttttgataaggatgccactcctgttttaccagccagtgaagtggttgacgctattctcaaagatttgaatgacgctgaaaaattactgaaagagagtgatcctcttgatttctttaccgatcagacggatgaagattttatagataaaaatcattttcttgtcaatcgtgagtttcgtatgaatctatatgcggttaaagctatgctggctcgtgtatattgttacaaaggtgatgcggaaagtaaaggattggccacggagtatgctaaagaggtaattgctgcctctaagtattttgcattgtacaagtcgcagactgcttccaattacaattccatacgctatgcagagcaaatatttggaataacagtgaatgaattctccaacttgcttattggtaactatatggatatggagaataccaatactcagcaacgtttctatctggatggagataaattcaaattcttctatgaaacagccgatgcagggaataccgactggagaaaaaatacggaaatgtttgaagttgttaatggggcaagtcaaacagatgttttttgtagaaaatataaccagaaaccgttgaatggcggatatgcttattccggtgctaatgcagttcctttgatacgcttgcccgaaatgtattatattgtagcggaatgtgcatcttctgcatcagaaagtgctgatgcattgaataccgtacgttttgcacgtggtatctcttacagtgacgagattataactactggatatgatgatcttgatactacttcggaagaagacaaaaatcagactaaacgtatcaatgagataatgaaagaatatagaaaagaatatttcgcggaaggtcagcttttctacttcctgaaagcgcataattatagcacctatcatggttgtgggattgaaacgatgactgaagcccattatcagatgacgttgccggatgatgagtatatttttggaaacaactctaaatgatgaagcattatgaaacgtattatatattttgttttagctattcttgtttgcggcatctatgtgggatgcagtgaaaacgagatagacttatatgaccagacacctcgtatcaatttctatagtagcacacatgtccgtactttggttgatacggactatgtgaagatagatgacccttatgctgtagacagttttacggtaagaatacaaggggatcttttgaaagagaatcgtgatttctgtgtgaaagttaccccgaatagcgattatcagaattcagtagatgtactattaatcagcaagtatacatatactgaacttgatacggtttgccaggtattttactataagattaaccgaccgaaagtagagtccggtagaaatgtgtatggttgttacttggaatttgatttggataaccctctccatcagtttgacaaaggattggtagaaaagaatcaggaagtgttaaatgtcaggtgggaactgaagccggatgagtgggaagattggatatttggcagttatagtgataataagtatatgtttattatggatgtatgccaacgtgtgtgggatgatctggaagatgaggatgttgacaaggtcaaacaagcttacaaagaatacattgaagcaggaaatcctcctattctaggcgaagacggtgatgaaattgattatgaataagactaaaagaaatgttatgagaaaatatatcatctatatagcaagttttgtcggatcggctttattgcaaacaggctgttacgatgacaagggagattacgattatcatgatgtaaatacgatggctatcgtaatacctgaaacgaaggtacgtatgcctaaagaggaagcagtggaaatttcaattatacccgagatttctcagactttggagcaaaatgaggaaaaccttgtgtttcaatggaagaaaacaatcgaaggaaagaaagcggggtcggacagacttagtgattataaagattattccgtaggcaaagaatgtaaagtaacagtcgagccttatgaatcggaaaatataggtttaatgttggtcattacggataaaaagaatggaacaacctggtatcagataggtgaagttgcaattattcgtcctttaaatccttgctggtttgtattgcaggaaaaagaaggaaagggagtattaggagcgatagagggtactccggaaggatattatgtttatccggatgtctttaaatcagaactgaatcagtcatttccgttagaaggaaaacctttggcggtaagtgcaagaaaaaattatggagattcgtttttaagtagtatgctgggtttttttggttttaaagtaagtccggcgttaatggtggtaaccgatcggggcttggccttgttgactccaagtactttaataacgagatatccgtcgaataaaatactttttgaaccagcgggaaaaggggaaccgttgaatattgagttctataagatgagtactcatggtgagttgtttgtgaatagtggaaaagcatattgtgctcctatggatggattttgtgtacctttctcggtaaaaaaggaaagtgagtttcctgctatttctgcttatggttcgtatggaggaggctttttgttttttgattctgaaagtcatcgttttcttagtgcatctattccgggttattatgattatatgatgaatcaggctactcaaaatatacgtaattatggtactaaatggagtgaccagaagcctgtatccacgtattcaatgtcagacgaatctaatttgtttgatccggatgtaattgatccgtctttagaaatacatgatattgttacgggtggaaattggggaaattttgcttatgcgattgcttctcctcggaacggaaaagagctgactgtgtttaaattcagtgcgcaagatgaagatccgatttgtgctgcccagtatacgattgccttaccgtccgaagtaaatgtagaaacagcaaaatttgcagcttcttacgcgtatacggcaaatcttatatttatgacatcgggtaataaattatatcgcattgatcttgatcgcggaagggcaattgaactttatacttatgaaactgatccgtcagcacagatagttgcattgaaatttaaagattctgaaagtgtgagagaggaagatgacgatgaggagactggtgaatataaggagaaactcggcatgtctctcggattaggcatcaatacagctgataaaggtgtagttgtagaattgcaactgacagtggcaggtgatgtatcccgcgaagaaaacagcatttgtgtttacgaagatcccgagcaactcattgggaagattgttgatattagctataattatgaatagtataaatcgctctttatgctaaaaggaattatcagtgcaatatttcttgcagttgcctgtacttttttgtacgggcaacagccaaatatggctacttttctaaaagaaggagcaccagtggaagttattcccggtatgtttactacttatcgaagtggtaaacatatatattgggaaattccggattcattgattggacgtgaatttgccgtaacaactactatcttgactgctcctgcccgtccggatcgggatatggagaagaaattcggatattcgggtgatatgataggtccggtattcttcagtttcaggaaacagggtgatgaattgtggatagtagatccgttgaatgaaaggattattgaaaatcctgcagggatatatgcaaagattgctgcccaacgtgggaatagcagactttataaaagattgccggtcaaagcaaagactcaaggaagtagtttgatagagattggcgaggtattaaaagatttccctttgtttacgctcgatattgtatcttttgatttattggtaggttcacgtttaaaagagaaagattgcatcaaggaaatcaagggatatgacaaccgcttgttggttcatatatcacgggcttatcgaagttcgtcaataggaatgcccggcaaacctgtttctccgtcttatattggtgattgggatacgggtatttgcattaaattattatcaaaaaagccattggaagcagtttctgcaaatagcggagcctacttttccatcggcaaggaatgttttcaaggcgatcagcccgctgtccggaaagctgttatcaaacggtggcgtttggagataaagccggaagacaaggaaaagtacatgaaaggggaattagtggagccgatacaacctattatcttttatatagatcgcaacacgccggaaaagtatattggttgcattattgaggcagtacgtgactggcgtcctgctttcgagcaagccggatttaagaatgccattgatgcacgattggctcccactgccgaagaagatccggattttagtatttatgacagtacttatccgtttatttcatggaagatatcaggacagaataatgcttatgggccgactccttgtgaatcccggtccggagagattattgcttgtcacgtcggtattttcagcagcgtgttgaatttggagcaaaaatggtattttgctcaatgtggagccaatgacccgcaggcatggaacatagaatttccggactctttgcaattggaacagataaaacaagtattcattcatgaagtgggtcacacattgggattggaacataactttctgggtagttcccattattccatagaccagttgcgtgataatgactttttgagtcgatatagtataggaagttccataatggactatgtacgatataattacgctttgcgtcctcaagataaggttgatttgaaaaacaggcgggtacgtgtcggcgaatatgataagtgggctattgaatggggataccgtatatttccgggtaaggatgcttctgaaagagaagagaacagagagcgttggaatcaggaaaaacagaaagatccttccttgcatttttcaggtgggatagatgtacgggcgcaggcggaagacttaggtaatgaccatgttattgtcaatacacaaggaatagagaatctgaaatatttgtgtgaacatccggatgtctggcatgtaacggacaaaacgtctttatatgtattacaggggcgttatgaagcggtattgaatcattataaacagtgggtacagcatgttttgtcgcatttgggcggaaaacgtcttgcggaagccgatgatgagaatatttatataccggaaaaggctgattacaataagaaggtgatgaactttatacagacttatgtattacagcctcctgcgtggatgtttaataaatcgtttacccataaattagaaatagatgccagtcaagaattcgaccgtttttatgaggaacttatgtcggaaataatccgttctcttcggaaggtggaagaatcagagaatgcttgtgaggatatgttatctgtaaatgagtttttggaaagtatgcatgaagggttattcgttgaatggactgataatgttcctgtaagtgaagcgaagcataagatacagacgctttatgtaaataaactctgtgatttactggatcggtcggaaaagataacctcctcgaaattattagtttctgttatgcaagctttgaatagaattaagaaagaggggcttgattatagtaatagggtagcagaaccggttgctaaaaaacgtgctatgtttctggtagatagcattatattttaaggatgaaaagcaaataaagaggctcatgaataaaagaaaatatgtgattattatattgttgtgtatggccgcatggctccaggcacaagattccgtcaaagcgtttgatgaattctttgtcaccggaatgaaaaaaatagagggtgtatttcctgtatatgtagcggagaaggaggtttatctggaaataccccgtgaatatatcgggcgggagattgaagttcgcggacagatagatagaggcttcgatttactgaatcgtcccgttaccggtttgggggtagtacgcatcatgtctcctgataaagctacgatttgtttccaaaagccgttttatacagagcgtattctggatgaaaagagtgtatatcagcggtcgttttcgttgtcaaatatacaacctgccggtgatagctatccggtagtggcttattcgaaagaacaaggagccattatccgaataacaaaatatctgataaatggcaatgactggttcagctataatcatggttttatccgttcgttggttccggaactgtcagaggtaacaaaaatacatccttttgaaggaggggtgtcatttacggtcaggcgttatcacggggttgaggcggaaagatatatgttttccagctctgccattatattacctgaaggcagcatacctttggaggttacttgtgtagtacgtttgctccctcaaaagaaagatcagatccgcctggcagatcacaggataccctatcagacattgacttttaaagattattcccaagatccttattgtatggtagaagattcattaattcttcgttgggatatgtcgaaaccgcttattttttatgtagatacgctttttccgaaggaatattttcaagctgtgaaagaaggaatattggtatggaatactgcattccgcaaggcaggtatccgggatgctttacaagtgaagtatgcagacagcaagattgttccggccgaacagcgtgctttcgtttcttatgatttgatgatgccggggataaagagcgactttacctgtcatcctcgtaccggagaaatactgtcatgtcgggtgaatatcggacatggatttcaaaaaggaaaattggatgactatttgttgagttgtggcgcttcggatccgcgtatcatagccgaccgttatgcaaaggaagtggaaaaagagttgttgcaaaatgaaataacaggggaaatcgggcatcttttaggtttacgcggaaatctgtccaaaaactcgtgcggaacgactgtgaaagtaggggaagatgcttgccgggctatttattttggttataatcctctcaaaggaagtaggaattgctatgatgaacgggagcaactccgtcgatggatagataaaaacctgccggatgggacccattctcttcctccatccgattatgcagcaaaggtgtcaaatctgcagattatactaaatcaattggataagattgtgtataaaggaggaaaaagggacaaaggaagttcactcactgatatatacaggaaggctattcgtcaatatggaagttacctgatgggaatagctgaaacagtgggaagttcccaaccggcagatgcacaacatcaagcaatgctcgaactggataactatttatttcatcctgtagaaaagatggaatgtacgtatgtaaaagagaatttactggaagcaagaaataacattctatatccggaattggtaaagatgttcaagcacttactaagtatagaaacaatatcggctcttagattgcaagcattacatagtaatcaaaaaggatatagtgatgacgatttcttccgggatttgtataaagggctgtttaatgattttgatccgtcggctgctgtaagctatgaacaaatggatatccagttgatatgtctggacgcatggttggatataatacaggaaaatgcaaaacatactagtacaacgaagcgtttaaaggatgaattgcatagtctgtacaacagattggagaagcttagtacgatacatccccaggcagaggtgcgtgatatgtacactttacttatgggaagaattaagtgaaaaaatagtcgtacagataggataacctgtaagttttgggttatctttgctatgatttatgaataaataattagaataaaatgactattatttttccttcacccatcttcggccctattcattcccgccgtttgggcgtttctttgggaatcaatttattaccggaagacggtaaggtttgttcgttcgactgcatttactgtgagtgtggcttcaatgccgaacgtcgtacgaagaagcttctccctacccgtgaagaagtccgcacggctctcgaagagaaactgaaagatatgcaggcaaacggttccgctcccgatgtactgacctttgccggaaacggtgaaccgactgcgcatccctacttcccggaaatcatagaagatacacttgcgcttcgcgacaagtatttcccaaaagcgaaagtaagtgtattgagtaactctacatttatcgaccgtcctgccgtattcgaagcactgaacaagatagataataatatcctgaaactggatacggtggatgaagaatacattcatctgttggaccgtcctaacggaaaatactctgttaagaagatcatcgaaaagatgaaagagttcaaaggaaactgcatcgtacagacgatgttcctgaaaggaggttatcagggaaaagacatggataatacatccgacaagtatgtgctcccctggatagaagcagtgaaagaaatcgctccccgtcaagtaatgatttatacgatcgaccgggagactcccgaccacgatttgcaaaaggctacacatgaagagttagaccgtattgtggctttattggaaaaggaaggtattccggcaacagcttcttattgaaatataattcaacagggatatatttctaatagataatacgtaagagagttaatataagagggcgaattaatagaattcagaagttttacttcctattctattgctcgcccttttattggcttcatgagctgtttcagcctattctgacaagggtatattctcactgcgatgagaaatgtacttccctgataattgaactgcaccccaaaagttagacacaaaactttaggagtgcagttttttatgcgacattcatttgaagaaaaactcaatattgtgagcaaagtcaagagcggtcagctcattaatacctctttggttgttcggtttcttatatgaaaggctagcttcctttcttcacataatctttcggcaatatcccgaactgtttctgaaagcagcgcgcgaagtatgaaggattattaaatcctacgatgtagcagacttcgttaatccggtattccccttcccgcaaaagttctccggctgttttgagccgtatcaaccggatataatcattgggtggcattccggtcagccctttcaatttgcgctgtaagttggaacggctgatagccatctcctctgccatcttatcgatggtaaattcttcattggtgaaattgcgggtaatgatttcattgatcgtgttcagccatttcacgtctgttttgttcattaatgtctggtcgtatgacatattcggaacagttgtaaagtggttgaacagcatgcgccggttttccagcagattattgatggtggctttcatgtgacttagcgagaaaggcttttctatataagcgtccgcgccatagtcaagacccgcaatttttgaatcgatgctgtcgagtgccgaaagcaggataaacgggatatggcaaagcatattgtcggaacggatggactttaataattcgaatccgtccatgtgaggcatgacgatgtcactgataataagatctactgtcgttgtctccagacattccaaggcttccttgccattggcggctgtatggatggtgtaggtatttcccagattcttagccagaaactccagcatatccgttgtgtcttccactactaaaagagagtaaccggcgggttcgccttcttcctccaaagcgggaaccttgtcgggcatggaagtaatggaggggctgacagagatgcttttctccaaatacggaatttccacacatacttcgcatccttccgtatagccgggattgatataaacttttcctttatgcttttccaccaacaatttgacgagacccaatccgattcctactcccgaaccgttgtttcctgtgtttcccacttgataaaacggttcgaaaaccttgctgcattcctcttgcggaatacccggaccgtcgtcgcgtacacacaaggagagcgtacgcccttctgcagacagatgttcgtccaaaatcaccataatgcgggtgcgggcatatttcatggcattcgtcagcaggttgctgacaattttagtcagcgcctcctggtctacattatattgcagatgttctttcggcagggagacactgaaagagattccggtcagggagatggcacggaaacggtcgatgatgtcctctatcatccggttgatatccacttcatggaatgaaagcgtataaccttccttgtccacttttcggaagtcgagcaattgtttgataagctccatcagccggttggtattcttttgtatcacagacaggttgctttccacttcactgttccattcatgtgtttccaaaatcgcttccagcggagctttgataagactaaccggagtcttgatttcatgtgccacttgggtgaagaatgtaattttcgactggaacaattcctgattcttgatttgttccatctctttcatctttcttgctttcacagcctgctgtttacgcaaataaagctgtatcaggaaatatgcgaggccacacgctattagtaaatagaaaatcttggcataaatggtcttccagggtggaggaagaatttcaatatgcaggcaacagtcgtcattgctccaatattcatcgttgttactggctttcacacggaaagtatattcacctggaggcaggttgagaaaagatacgttatgtttatccgtatatatccattctttgtgaataccgtccagtttgtaggcatataaattcttgctgggagccacataactaagactttcgaatgcgatgtcgaacgatactacctgataaggaatcgttacttgtccgctaagagcaggtatacgcttgctaaggcttactttgtcgtcggggctgtgcatatataccgccgagatagacgccgtaggtcttaccttattaatcgataatttgaacggatagaaactattgaacccgttcactccaccgaaatagaatttcccgtcactggcttgcagggaagagcggaaattgaactggttgctttgtaatccgtcctcgatggtatagagctgtgcccgtttgttctgcggctcataccggatcagtcccctattggaagaaagccaatagttacccgattggtcgtccagtatgccatagatgatattgtttggcagattctctttggtagagaagttttcaaaacggtcctcctgatagtgataacggcagataccaccgccttcggtacagaaccatagatgctgcttatgatcgatatacacacggattacccagttgctacaaggagaatcaggatttactgggtcgttgcgatagttgtgcaatttaccggtttggcggttgtaacgccaaatgccgtcccttttgcttgccagccacatgtccccatgttggtcttcaaccatatcgtagataaagatatggcttaaaggttccaatgtccggaaagagtcactttccgggtcataccggcagaatccggaaagcgttcccagataaatgctgccatccttcgtttgatagatggagtagatatggtcgttaggaattgaatgtgggtttgcgcggttatggcgatagtttttcatttttcccgtttgagtatccaggatatataatccccgtgagaaactgccaatccacaattttccttcattgtatagtagtgcatggatattgtgataaccgatgttagggttactgcttctcaacagatggttcttgaactttttcgtgcggggatcaaagagattcagtcccccgtcttcggtagcaatccaaatgttgccatcgggatcttcgcagaattggctgattacatttcccgaaagagaattttccgtaccattgggataataccactcgatatccttatgcttgggagacaggtaactcactccactgaaataagtcccgatccagattcccccttccctatcctgataacaggcatagatactttctttattttgtccgtcgtcggtaggcagacattctcctgtcgtggtgttgaatgtataaagtccgtcgtcggagccgagatagaaagagttggctgtccgttgaaacaaggtgcggatgcgcggaatggtaagcgtgtccccttctccgaagtaatagcggaattgccctgtctctttattgaaacgtgccagtcccccgtaccatgtacccgcccataatactccctgcgaactttccatcaaagagataatctcgttgcaggcaggacgtccgaaagaagtgccctcggatatatatcctgtgaagttgtccgtacgttggttgtatttcgccagcccattccgggtacctatccagatagtcccgaacgagtcgttataaatcacccatatgtgattatccggcaatgaatgaggatcggaaagagaatgcagatattgcctcaacgtaccttttttctcgttgtagacaaacagcccgttggttgttccgatccataactgcccgtcattgtcgtatgccattccgaagacgctgttgactgacaccccgtcttccgtctgtttatcgaatacggagaacttctcttcccacgaatcgaataaatacagcttctccgtacttgccacccaaatctgattgttatcctgatggcggcaaatcgttactatattcatatagctgtttccgccgttttctgacgaatgtccgtagttggtgaactcgataccgttgaaacgattcagcccgtcctgcgttgcaaaccacatatagccgatgctatcctgaaggatgctccggacacagttgcccgataaccccgatctaacgtcatatttcttgtagatattggcgaagaccagagaaaccgatgccagcagtatacatatagataagatggatcgtttcataatttcctttctttatatcccctgtttgcaggagctatatatcctgcgtagtggatctatatgcccaatacgttggatatatatacccaacacgctgggcatatatgcccaacagattggatatatagctcctgtaaacagggtaattaccctctttatagaagcctttatttcacatcatcccacgtatctgtgcggaacgggaaagcactcaatccgaaagtattccgtagcgtgatatttcccacataattacggaaagcatagcgcacggcaaccggctgggctatctcttcactccacacttctactgtgttggtacgtcctacaatctttgctttcgccggatagaacttcttgtccgctcccgcaatctcaaatccttccagttcggagaaagtagggaacaaccccgcaggtgcattatcgaatgtcactatggcctttttgtccgcatagtccactttggtcatcatcgggccgttggatggcaaccggcggataccgtatgtcttagtcagtgcaagcgtagccaaccgaagccctactacatccttctgtggcggatggatgcagaattcatcaccgatatccgtagtgggtacaatgcccgaattagggattgttttcagtgcttccacttgtgcttcacgcagcaaggcggcacctgtattccggctgttttcatatttgtaaggagcaatctgcacataatagaaaggcatatcgggcgcttcccacacatttctccatagttgtaccatagcagtcatcatcggagcatagaattgataattgaaaatgttcgattctccttgataccaaagaaatccacgtgctgtataatttttgacaggccataacatgatatcatacagacaccctaatcgattacgtacatccagtttagaacttttggctgtctctatatctattccttgaatggatgacagtgtttcttcggtcatccaggattcaattcgggaacctccccagctattgattaccaatcctaccggtagatttagagtttcggtaatttgtttggcaaaaaaataagctgttgcactgcaatcaatagttgtttcaggagtggagactttccatttttcttttttaaagtccgcccttcgctgtacatcttttattcttggcacggtgataaaccggatacggtcacggtagttacctgcattcagcagcgtttcaagtgagttgtcaatgggttgtgccgtatttcccatcatacgcatttccatattcgactgtccggagcagatccatacctctcctatcagtatatccgagagagtgaccggagttccgtcactgatagtaatggaataaggagtataccccccttcgggagtgtctactttcaccagccaagtcccgtctttatccgtagatgcctgataggtccggttgttccacgaagtggtgacagttactttcttaccgtctgcccaaccccataacttaacggaactgttctgttgaagtaccatgtgatctcccatcattgcaggaagttttactttgccttgtgcaatcggcaggaataaaagtgataaaataagaagtagaaaatgttttttcatactgtttttattagatattcgacgaatagttattaggtatcgggcaaaaatacaacctatttttaaatatggaataaaattatctagtcattttctgataaaaactagtcgaattcttaaaagattgtttttcctttccattctcctccgaattttattaattagtggcatcaatcgcctaaacagtattattagattggctaaatatcccatttctttgcagggtgagtatttaacaacctaattgtttcattaaatctaataaaatgaaaaagaagcattatctattatttttattggctttgctctttttactgacagatgtggtgtgggcacaaacatctgccacggtaagtggagtagtgatcgatgagaatggagaaaccctgccgggtgtttccgtcgtcgaagtaggtacaacaaacggtgtcctgacagacctgaacggacactacaccttaaaaacaacttctgccaaaccttccgtttctttcagttacattggttatcagaccaccacgcttctcctgaacgggcgtacgaaacttgatgtacagatgaaagtggaaacgaaagtgctggatgaagtagtggtagtgggctacggtgtacagaagaaagtgaacctgaccggttctgtgacttccatcaactttgccgaccagacggaaggacgacccatcatgagtgtttcttccgccctttcgggacttgccgccggtatgaacgtcacacaagcttcgggacaacccggctcggacggtgccaccatccgcgtccgcggtaacggtacgttcaataccaactccccattggtcctggtggacggtatcgaatggagcatggacaatgtgaaccccaacgacatcgaaagcatctccgtactgaaagacgctgcctccacagctatttatggtacgcgcgccgccaacggagtcatccttatcaccaccaaaagcgggaaaggcaaaccgcaaatctcctattcttattcgggagttgtgcagatgccttacaataacctctctttcgtgagcgactatgcccgctatatgggactggtgaacgaggcttgcgacaatgtgaataccaaaggcatcttctcgcaggaaagcattgaccgctggagggctgcttctgccgatccgaacgggttgaacgagtacggagtacccaattacgtagcttatcccaacaccgattggttcgacgaagtattcgacaccggatattcgcaagagcacaacctgtctgtctccggcagttcggagaaagtgaaatacatgctttcattgggctatcttgacaatcagggagtcatgaaccgctggaacctcgactcaagtacgcagaaaatcaatttccgtaccaacctggaagccaagatagtgaaatggatgactgtcggcacccgtctctacggacaaaagcaagattacgggatggctaatatcagcaacggattcaagtatctctatcagaccactccgggtgtataccccggcgaaccgaactactggggacgtgccgcactggccagcgaagaatcttccaatgccaataatatctttggtcagatggcaggagccaccggtttcaataccgtctggcgtctcaacgcatcagtctacggaattatcactccctataaagggctcaacattgaaggtacattcaactattcgccgacattcaccgacaagtcttcttatagccgccaaaatggttattgggactacgtcaccgaccagcgtgtcagcgaaagcgcgttggagaacgcttccatcaccaatacgagtgcacgcacctggcgtcagagtgccgaaatactggtacgctacaatacaaccatcaagaaagaccacgacctgggcgcactgctcggatattccgcacaggaatattacagcaagagctttgccgtttcccgtaaaggcgctacggactggacgctgaacgaattaagcacttacgagacgctcgtcagctcttccagctcggcacccgccaaatggggattgctctcttatttcggccgtgtcaactacggatataaaggacgttatctcttcgaagccaaccttcgtgccgatgcctcctcccgtttcggtgtgaaccagcgttgggggtatttcccttcgttctccggtggatggcgtatctcggaagaatcgttcatgcaaggagcatcggactatctctccaacctgaaactgcgtgtttcctggggaaagacaggtaacaattctacgggcaactacgactggcaggcaaactacgccacaggcaatgttgtaatcgacggtgaaggaaccaaaggattggtacgcaagaaactaagcaacgacaagctgcattgggaaagtaccgccaccaccgacatcggacttgatttcggcttcttcaaccaccgcctgacgggtgagatagactattataataagtatacttcggacattctctaccatcccgaactctatctttcgatgggtgttgtaggctctgctcccgagaatttgggtgaagtgcgcaaccgtggtgttgaatttaccctcaactggaacgaccgtatcggaaaagatttcgaataccgagtgggtatgaacttctctttcaacgccaacaaagtgatgaagttcaaaggcgaactccagaaatactggacgtatgatgcacagggaaacaaagtgagctatgtcaacaacttcagtgatgtgtctgaatctggtttcggaggctacatctgcgaaggccgccaactgggagaaacctatatgtataaggtgtacagaggttccggcgaaggctataccggaggtgcggtggatatccatgcgggaccgaaggacggaatgatacgtacgaaagaagatatggtatgggtgcaggccatgattgactccggttattcgttcggaggaatgaagacggttgccaaagaccagctttggtatggtgacatactctatgccgacagcaacggtgatatgaactacggtgatacgaacgaccgggatttctccggacacaccagtgtcccgaaattcaacctgggcttcaactgtgccttctcttacaagaacattgatttctccatgttatggtcgggagctttcgggcattacctcaactggaatacggattactacaactcgacactggtcagccacggatatggcattatcgagcatatcgccgataaccattacttcttcgatccttccaacccggacgatccgcgcaccaaccagtggggcaaatatccccgcctgacatacggtactacctataataacagaatccagagcgactggaacgaatataagggcgactacttcaagttgaagaatatccaaatcggctatacgttgccgcaacggatttccagcaagttctttgttaataaactccgtgctttcgtgtcgatggacaatatcctgacgattaccagctatccgggactcgatccggagataggaacagaaatcggttatccgttgatgcgtcagatttcttttggcggacagattaccttttaatgatgtagaactaaaaaacagaatctgatatgaaaaagatattaatgattttaacgatggcgctggcggctacctcctgcatggatattctcgatgtggctccggaagaccagattgcaagtgaaaacatgtggaccacggaggagcttgccgacaagggaatggcaggactctacttcccgttctatgccacccaactctcctctacccagcttcgccgtgccgacggactgaaccgtcagggaatcgaagctatgagctttgcaaccgattattattccaacaactatccggtggaactgctttcgctggctaccaagcctgccaatgactttcaggtgtggtatgaatggaagttctgttacaccatcatccatgcgtgtaacgatgcgattgccaatctgcataaagcggatatgagcgctgataaactggcgcgttaccaatgcgaagcccgcttccttcgtgcctgggcgtacaatcgtctgaatatgctttatcaaggtgtccccgtttatctggaacctatcaataacgaagactgtacccgtggccaatcttcggtggatgaggtatggcaagtgattctggatgatttgacgtattgcatcaacaatcccgacttccccaataacacgctgaatgaaaactacggccgtccctctaaaggagccgcttatgccctgcgtggtatggtatatatgtggaagaagcaatacaaggaagcaggcaacgatttcaaagaagtggaagcgtgcggttatggcttgtggacaggcgaatatgccgacttcttcaaatatgaaaacgaaaaggataaagaaatgatcttctcgctccagttcagcgaagaaaccggttattgtgataacattcagcaaatgaccggtgcccgcgatacgtatgatggctggacggaaataaaaccttccgcagactttgtggactactataagaacgcggacggatcggacttcaaatggtcggaagtagacggcttggaagattgggacttactgactccgcaacaacgtgaaatctttttctgccgtgacggattggaatccatgtcctcacaaaaaaatgcccttatcaaacgggtaggcgaagatatctatcagaaatattacctcaacagcggtaatgaagcccgtattaaaaaggcgtatgacagtcgtgacccgcgtctgcaacagaccgtcgtcactccttatgtgccggtggactgttacaagcctaattatgcaggagatgctaaccagatcggtaaacaactccgttggccgttgaaggaacagggaacgaatggcggagacttctggctcgataaacgtacttctgctttctactgctatcgcaagtacaatgagtttgagaaaggccgtttgattagccggagccgttgccataccgactggccgttgattcgctataccgatgtactgttgcagtatgccgaagcattggcgcagaccgatcagttgggagaagccatccgtttggtgaataaagtacgtacccgtgcccacatgcctgcactgacagagggcggaagcggcccgtgcgcagtgaacggaaaggaagacatgctcgaaaggatacgttacgaacgtcgcgtggaattctgcctggagggaattaacttcttcgacgaagtacgttggggaacctacaaagaaaccaaattccaggggaaagacgtgaatggcggcaagtcctggtggggcgatatggtagagtataactggtattacaccgattacatgtggccgtggactgctcctatctctgaaacgcaaaagaacccgaacctgactaaacgaagcggttgggcgtattaatcataaagatttgaataaggatgaagaaaatacttttactattactcatttttgtatccggttgcacgggtgtagttgcgcaacagtttgattatggcaagatagcgcctcatccccggttgttattgccggcgggaggagaagaagccatcaggaaagccattgcggagtatcccccgttggccactgttcaccagcggatcatggaactttgcgaccggacacttacggaaccacctgtggaacgtatcaaggagggcaaacgcctgctggcgatttcgcgcatcgcattgaagcgtatctattacctctcatacgcttaccgtatgacgggagataagaaatatgctcaccgtgcggaacaggagatgctggccgtcagtcgtttcaccgactggaaccccactcatttcctggatgtgggtgagatggtaatggcattggctatcggttatgactggctgtacgattctttgcagcccgacacccgccgggtagtgcgcgaagcaatcatcgcgaaaggcttcgacgcggcaaagaacacccgtcatgcctggttctatacagccaagaacaactggaattccgtatgtaatagtggattggcgtatggcgcgctggctctttttgaagagattccggaagtatcgaaaggcatcattgagaaatgtatggagacaaatccgaaagcgatggtaggttatggccccgacggaggttatcccgaagggttcggatattgggggtacgggacaagttttcaggtaatgctcattgctgcgctcgaaagtgctttcggcacagacaatgggctctcccaagcccccggcttcatggagtctgcccgtttcatgcagtatatgacggctccgggtggagactgtttctgtttctcggattctccggtagaggcggagtgcaacatgatgatgttttggtttgcaggcaaagcgaaagacctttccctgttgtggattgaacgtcagtatctcgaccggccggatatgccgtttgccgaagaccgtttactgcccagcctgatggtgttctgttcgcagctcgatttgaagcatatcggcaagccgaagaaaaacttttggttcagtcgaggagatacgcctgtgtttatctaccgtggcggatgggacagcaaggaagatacctatctgggagtgaaaggcggttcgccttctacctctcatgcgcacatggatgccggttcgtttatcttcgagagagacggggtgcgttgggcgatggacttgggtatgcagagttacatcacgctcgaaagtaagggagtagacctgtggaatatgtcgcagaacggacaacgctgggaagtattccggctaagcaatatcgctcacaacaccctgacgattaacggcgaacgccatttggtaaagagtaatgctccgatcacccgtactttcgagtcgaagaaacagaaaggggcggaagtagacctgtcgagtgtgtttgccaacagcgtgaagaaagtcgtccgcaccgtgatattggatcagaaagaccatctggaagtaaccgaccggttggagacgggggacaaggaagctgccgtatcctggatcatggtcactccggcggaagccaaaataacgggcaagaaccggatggaattaaccaaagacggacaacggatgctattgacggtagatgccgatacggaagtagaaatgaaaacctggtcgaacgtgcccccgcatgaatatgatttccgcaatccgggaaccatccgcgtgggttttgagacggtgattcctgccaatcgtgcctcgcaactgaaagtacgacttattcctttgaagtagtaatacaaataaattcattgaaccatgaaaacgattctttttaaaacaatcatcatagctttctttgtaggaacagccgttagttgttccgatgaagatgagaacagattccgtccgggatctacccatgagaaaccgaatcccacggagccggagggcggactggattattccaaactgactgcggacaatcatccccgcctgttgatgaacgccgaggccttcactgcgttgaaagccaaagtggatgccaattcgagtgccaatctgaccttgctccataataccattatgagtgtatgcaacagtaaagggatgaacgccacggcactgacttataaattggatgccagcaacaaacgtatcctcgatgtgtcccgcgacgcgttactgcgtattttcacctgtgcttatgcctaccggatgaccggcgatgccaaatacctgactaaagcggaaacggatatgaacgctgtctgcaactttcccgactggaactcgaaacgccactttctcgatgtgggcgaaatggctacagctgttgcattcggctacgactggctttacaacgaactaagtgcagccacccgtacgaaagcggccaacgcactgttgaagtttgccttccaacaggcacaagataagaactggaacctcaacttctacgaagccaccaacaactggaaccaggtttgtaatggcggactggtttgtgcggcactggcttcctatgaaaacaatccttccgaagcaaaggacatgattgaaaaggcgttagaatccaacaaacctgcattggaagtgatgtattctcccgacggcaactatccggagggcagcggttactggtgttacggcacgctctatcaggtattgatgcttgccgccctcaacagtacgcttggcacggataacgggctttccgatacaccgggattctccaagacggcagagtatatgctgtatatgacaggcctgaacagtaagttctttaattattctgattgtgccccctcttctaccgcggcattggcttcgtggtggtttgctgataaatacagtaatccgtccttattatataatgagctgaaaatgctgaagaacggcgaatacgcttcttgtgccgaaaaccgcctgttgccgatgattatggcgtttgccaataatctgaatctggacgcaatctccgctccttccaataaactatggagtggaaaaggggaaacgcccgtggtgatggtacataccgactggacatacaccgatacggacaaatatctcggaatcaaaggcggcaaggcaggttcgagccacggacacatggatgccggttcgtttgtatacgacgcgtatggagtacgctggtcgatggatttcggtctgcaaagttatacaacgctcgagtcggtattagccggcttaggtggtaatctttgggatatgggacagaactcgatgcgttgggatgtatttcgtttgaataacttgaatcatagcacgatttcaattaatgacgcccgtcaccgggtaaatggggcggctacgctgactactactatcaataccgctacggaattgggagccactttcgatctgacagaagttgtgtccgatcaggctgcgtccgctacccgtaccgtgaaaatcgtgaacgataaagatttagtggttatggatgagatcaaggcaagaacggataaatccgccaaagtgcgttggtgtatggtgacgcctgccgttccgacggtggaaagtaaccgcatcgtactaacgaacggaagcaaagtgatgtatctcacagccagcggaagcgtgaagcctacctacaagcaatggagtaccaccagtgagaactcttatgaccaggctaatccgggcacctatatggtcggctttgaagcaacggtcaccgccaatcagaccgccacatttaccacaaccctgtcccctaaataaaaaagaatggaacgtatgagaatcctattaatatctatactcggacttttgacattggcctcctgcacgaagcaggagccgatggaggcattgattgaccgtgtatttgccgttgcggagcaacaatacacgactatggacacccgcctgacagaaaagacacttccccgcacgctctctgccgacggtgagtttgttccctcaaatatctattggtggtgcagcggcttctatcccggttccctttggtatatctacgaatatacccggaaggacgcagtgaaaacactggccgagaagaacacgctgaaactcgactctatacaatacgtgaccagagatcatgatgtcggtttccagttgaattgcagttatggcaatgctttccggctgacaggtaatgaggcttataaacaagtgctctatcagggcgccaagtccttgtcaacccgcttcaatcctgctgccggtgtgattcgtagctgggactttgtgcgcaaaggctgtgactggaagttcccggtgattattgacaatatgatgaatcttgaactgctgttgtccatgtcgaaagcctatgccgacgactctttgcagaacattgcctgtacgcatgccaataccactatccagcatcacttccgggatgattattccacgtatcatctggtggattatgaccctgaaacaggtgcagtgcgcggcaagcaaacggtgcagggcttctcggacgattcctcctggagccgcggacaagcatgggccttgtatagctatacgatgatgttccgcttgacggggtatcagaattatctgttgcaagccgggcatatcgccgatatgctgctccgccgtttgcctgccgacggtattccttactgggatttcgacgctccggtagaagaacagacctatcgggatgcttccgcagcggctatcatggcctccgcctttatcgaactaagccgttatatccccggcacggaggccaaggaatcttatcttgccatggcagaaaagcaactccgtacgcttgcctcgaaagagtatctggcagaaccgggtacgaacgaatgtttcatcctgaagcacagcgtgggtgcacttcctgataaaagcgaagtggatgtccccctgacgtatgccgattattactttttagaagcattgctgcggtataagaatctacaaaaataaaactaatacaatatgattatgaagaacttatatataaatatggcatttatcttcgtactactgctgataactgcctcctgctcggacaaggatgattcggctccgcgtgtcattcccaccatgaacctgacagtttcggagattgcggacaatacggctctgattacttccgagcagcaaacaggaactacgttcggagcgaaagtcattgaattctatccggtggccgacatcggttttgactataacattgaagtgaaactggtgaaatttgtagaagagaacggagaacccgtatctctgccctatacgcgtaaaatcaccgaaggattacgtccgggagtgaattacatcagtgcgatcatcgcctataatgccgaagggcgtgccgtgtgttccgctttccagacctggaaagcttcaggaacggaaggagcatggagtgacggcggttctgccggtgatctggaagagaatgaatggtaaagaatggtgtaactcaaaagaatgaatggtatgaaaaatagattatttgcaataggtgcaatgattctcatgatgacaagttgcacgcaggacgaacttatttcgtccgataacggcaaagaaccggcaacggcaggttcatgtctgacattggttggactttcgtctccgcagacacgtgtttctatcggtgacaaaacaggggatgtttatccggtgatttggagcgaaggggatgccttgggtgttttctcccgtacggcagggaccgacatcaataatgtgcagtctttattgagtgatgagtcgatcgggcagaactccggcgtctttacttcggacgacgtgaagatggcggaagaaggagctacggaacttcttatttactatccttatcgagcaagtacggaactggccgaaaatggcaacaagattacttctaccctgtctgttgagcaggaacaaagtcgtcccggcgatagccatcatattggaaagtatggttttgcgtttgccaaggctacggtcagcagtccggatatgcttgctaaatttacgttgaaccatgcgatggcttatgtgaagttcagcatctcgtcccaggagctttctacgtacaagctaaagagtgtttctttatatgacaaggagacaaaaactcctctttccggtgtattcacagcagatttggatacggacgaactgacctacggtacggatgtgaaaccgtatgctactgtttcactgactactcccgaactgctcgcttccgcacaggatatatacctgactacgtatcctgccgatttaagcggcaaagaggtgtacattgtcatcactttggaaaatgaccagcagactgttaccattcctattctcaaagaaggaaagcaactgaaagccaatgctgtcaatacgattgctgtcaacaacctgaaactttcggataactcctgcgaatggtatgagccggtagagacacgtttattggcaggaggatgggcttatggcgagtccaactgtctgttgacgaatatttcaacagaaggtgtggataatgtgataaatgtgaaagcccgtggtaatttcatggaagtggaagaacccaagtatgccaagactatacttaattgcgatttgggtaatgcgaataaaatggttcgggtaaatggctctgctacagatattactcctgtgaatggtgattatacgattacggtaacagggattcaaacatacgccggactacctggcggttgcggtcaggtggctatctatggagcggatcagactaccgtcatctggagttttattatctggatgacccctactccggcagaacatccttatggtaatacgggatatgtagtgttggatcgtaatctgggtacttatatgacgtgtgaaggagacaactggaagcaaaacggtgtttacttccaatggggacgtcctacgccggtcggctggtcgggaaccgtgggtactaatatacctaccgaagccaccaacatccgcttctctatagaaaatccccgtgcgttgctttataccaataatgtggataatacaaaatccgactggtatctgggtgcatggaccggtgcacgtaccgatcgtaaagatgacttctggggtaacccgaatgaatcgagcacttatctcaatccttctgacggtcataaatctatttatgatccttgtccgaaaggttaccgggttgtgtctccccgagtattggatgagatagagcagaaaggagaatttgtgaaacagagcgcaactgcggtatttaaatattgctatgacggtacgaattacgcatattggccgttggcaggttgtaagtggggttccaacggcggtaataatggcaacaatacaggattggataccgctaagggtgccgcttgctattggtctaactcatcggctagcagttatggaaatgacaaggatcagggagctacttctctgtattataaagtctccgataagacctggacacattcctccggtcgttcccatgcattctccgtgcgttgtatgaaagataccgagaatcgttgattctcttcatggattctcttcattgagaatatgaaatagaattccccgttatatgaaagtttctgcctgtctccggatacaaggtactttcatataacggggaatctgttctgtttttaagatattcacgaaaaaaggaaagaaagaaaagggccaaacagaaaataaactgcatgaacaattgcaagaatatgcattatctctctttatcttgtatttatttccttgaaatatgcacgatatggtgtaactaaaccatccgtttgccgtaatcaaaccctccgtttggtttaaacaaaccgtccgtttgctataatcaaaccatcggtttcttttaaaggaagctaaacttggtttttgaagaggatatattgagctggtttgtctttttctactgcctatttataaatagcaatctgatatatcctttgtgatatgatagctatttatgcttttgattaactgcttttattgtaacttgtttgctaataatgcctattttgtgttatttgcgaaatctgtaactctaaatggagggcgtttttcatgaagtgcaaggaagggctcgaaatataaagagcaggataggtaaaatatacaattcttcatgttggcacttctttcagcaatcaatgtctttcctttataagcatgtatctcttttaaatcaccatatatggtgaaaagcatgatagtatgctttaatactatgctatttatgtgcaaattcactgtatatggtgaatttacttgtttttatactaaaaagattctatctttgtgagaaagtttctatatatggtgaattatggatttaatagagataggaaaacatattcgcgaaaggcgtaaggagttggggttggatcagtctacgttggccactcttgcaggaatagggattaacgctttggtccgcttggaacgtggaagtggtaatccccgcttcgatgttctttttaatgtcctgaaaactttaggacttagtattcatattcaataatagacacacatatgagtcgatctgccaaagtctatataaaaggtgtttatgccggtctgttaacagaaatagatcgtgaacactattcattctgttatgatacggactattataataatccacaactcccagctgtctcactgaccatgcccaagacacagcaggaatatacctcttcctatcttttccctgtcttttttaatatgacatctgaaggggataatcggattattcaagctagaaacctgcatattgatgaagaggatgattttggtattcttctggctactgcccatacagatacaatcggagcaataacaattaaaaaaatgtgataatggaaactgatattcatatttgtccctcacttttacgggagactggtggagaaagcggatattcacccaaagccttgaagcagctttctgatgggaaaaatatatcttgtgaattaccttacaggcattttgacgataatgtcggtattgatctcttcaataacaatagcaaacgcatatccgtttctggagtccagattaagtattctttagttgccgatgacgggatattgcgattgaccaaagagggagaacagggcgaattcatattaaagcctgttcccaataatctccgtaacaaggagttttgtcctgctaacgaacatttgacaatgcagatagctgcgcaagtatatgggattccgacagctcctaatggattatgcttttttcaggacggaacccctgcttattttgtacgacgttttgatttgtcggagaaaggaaagttacaaaaggaggattttgcttctttagccgggcttaccaggaaaaatggaggttccgattataaatatgacaatctggcctatgaagagtttgcaagaattatagataaatacagctctgtcccccaagtggataaattgcgtttttttgaacttatcttgttcaactttgtctattctaacggcgatgcccatttaaagaacttttctttattggaagagaagaaaggaagattccgcctatctcctgcttacgatttattgaatactcatctccatataaacgatggtatctttgccatgagcaaaggtttgtttgttaatcctgaaccggattatttcggtggtgcatcagcggttactgggaagactttttatcactttggcttaaaaataggtctacccgagcgtttggtaaactcttgtctcgaaaaatatagtaagatatatgaattgactgatcaactgattgaacattcttttctctctaaagaattgaaaaagcaatatagacttatgtataagtcaagagtcgggagctatcttagtgttattgagtaataatgtgcacattattactctttttttatattaagatgaacaagatccccaaaaagatttgtctaacataagaatctgttctttttgtcattcttcttttctgttccgataattggccggtgatgttcccaaatgcgcttttacgtatttcccgaaaaaggactgattggggaagttgaactcttcggcaatttccttgatagacttttccgaacgttttaatcggtatttgatatgctccacggtagtttcgttaatcaaatccaacggagttctgccacacgcctgtttgatgactttcgagaaatgcttcggagtgtagcaaagctcgttggcaaaataactcaccgaacggtgcatacccttgtccttcgataatagttccatgaacttccgcaaaatataattcacctgtttgatgccttctttcgaaccttccatgttgccggaagcttcgatttccttatgaagctgccccatcatttcgcaaaagatagcggagaagagatgttgtatcacttctttgtggtagcgatgaggttcatcgtttatcttggctataattaaatcccgatagaatccgaagactgtttgatcctccccgttgtcaaccgacttcaccggattgttgtggatatgaatggcagtattccacgtttccttttccattttaataatacgttgcaggaaacgggtagagaatccggcaagcctgactttatatttaggactaagcatcgtatgactgataatcgtgttgggcagaccgagcagcagctcgcccgcctgcaacttgtaggtccggtagttgacgtccagctggatgcacccttctatgcaaaccgcgatgagaaaacaattcagtttgattgtatcattactataaggagtcccctcgagactgttgactatcgcaaagtcatcatctatataatcaaggacgtgctgactgtccttaaaatcctctatatccaccgtaataatgttctctttttccatgttctttttttgcaaagttggtgaataatcgggaaaacagaatgtcccatacttcttcagatttgtttgatatgtcgtttattgccaaatagttagctgtaataaacgtaaatggcgagaatgggacatttatggagggaaattggtcactgttaccttgttcttttctcctacttttgtccaggatttaacaaaagaccaaaagagaaagtatgattacagtaagcaaaaaatggatacggctgatagggattgtcggttgtacagtgtggatggcatcttgcaagcaggcatcggatgcgggagtgaaatcttcttcttatgcagtaatgcagatagaagcggtggataaggaattttcttcttcctattcggcgagcatacgtgggcggcaggatattgatatttatccgcaggtgtcgggaacgattgagaaactctgtgtgaccgaagggcaaaaagtacgccgcgggcaatcgcttttcattatcgaccaagtgccttacaaggccgcactgaaaaccgccactgctaatgtggaagcagcacgtgccgcgctgggtactgccgaactgacctacaaaagcaacaaagaactgtatgcgcagaaagtagtttcggaattcagtctgaaaacggccgagaattcttatctcaccgccaaagctcaactgtcgcaggccgaagcccaggagatcagtgcccgcaacaatctctcttataccgaagtgaaaagtcccagtgacggagtcgtaggtgcattgccttatcgtgcaggcgcattggtaagtgccaatatgccctatccgcttactacggtcagcgacaattcagatatgtatgtctatttctccatgaccgagaatcagttgcttgccctcacccgccagtatggtgacatggacgaagccttgaagaacatgccggaagtggaattgcgcctcaatgataattcggtttatgataagaaaggtgtcatcgaatccatcagcggcgtcatcgaccggcaaacgggtactgtggtggcgcgcgtggtgtttcccaacgaatcgcggttgcttcatagcggagcctcgggcacggtggtagtgccgagcatttataaagactgtatcgccatcccgcagacggccaccgtgaagatgcaggataagacgattgtatataaggtagtggacgggaaggctgtctctaccctgataacagtgccgaaaacaatgacggacgcgaatatgtggtgctggacggactgaaagcaggtgatgaaatcgtatcggaaggcgccggactggtgcgcgaaggcacgcaagttaaataagaaggagattgattatgaaaggaaatgtgtttataaaacggccggtgatggctatctccatctccgtactgattctggccatagggcttatttcgctcttcacgctgccggtggagcaatatcctgacattgcgcctccaacggtatacgtaactgccagttatacgggtgccgatgccgaggcagtgatgaacagtgtcatcatgccactggaggagagtatcaacggtgtggaagacatgatgtatatcagttccagtgcttccaatgcaggtttggctattatacaggtttatttcaagcagggcacagaccccgatatggcggcagtcaacgtgcaaaaccgtgtggctaaagcgcagggattgcttccggctgaagtaacgaaagtcggcgtcagcacaatgaagcggcagaccagcttcttgcagattggtgctttggtctgcacggacggtcgatacgatcagacgttcctcgccaattatctggacatcaatgtcattccccagattaaacgtatcgagggagtgggagacgtgatggagctgggcgatacgtacagtatgcgtatctggctgaaaccggaacggatggcgcaatacggactggttccgtcggacattaccgccatattgggtgaacagaacatcgaagctcccaccggttcactgggcgagagttcgaagaatgttttccagtttacaatgaaatatcgcggacgtctcaaaagcgtggaagaattccggaacacggttgtccgttcgcgggaagacggttccatacttcgcctgcaagatgtggcagaggtggagttgggtacgatgacgtatagtttccgcagtgaaatggacagtcagccggccgttctttatatgatattccagacagccggttccaatgctaccgctgtcaacaaagaaatcactgcgcagatagagcggatggagaagaatctgccggcaggaacggagttcgtcacgatgatgagttccaatgacttccttttcgcttccatacacaacgtggtggagacgctgattatcgccatcattctggtcatcctcgtggtctatttcttcttgcaggatctgaagagtacgctgatcccctccatctctatcattgtgtcgttggtaggtacgtttgcctgtctggtggctgcgggcttcagtctgaacatcctgacattgtttgctttggtacttgctatcggtacggtggtagacgacgccattgtggtggtagaggcggtacaatccaagtttgatgctggatacaagtctccttatcttgccacgaaagatgcaatgggcgacgtgacgatggctattgtctcctgtacctgtgtatttatggctgtgtttattcctgtaaccttcatgggaggtacttcgggcgtgttctatacacaattcggtatcacgatggcaactgccgtaggtatttcgatgatttcggctttgacgctctgtcccgctttgtgcgccatcatgatgcgtccgtcggacggaacgaagagcgccaagagcatcaatggacgggtacgtgcagcttacaatgcttcgttcaatgccgtattgggtaaatataagagaggtgtgatgtttttcatccgccatcgctggatggtgtggacttcactggctgttgccgttgccttgctggtttacctgatgagtaccactaaaacaggacttgtgccgcaggaggatcagggtgttatcatggtgaatgtcagcatttcaccgggaagcacgctcgaagaaacaacgaaggtgatggaccgtttggaaaatatcctgaaagatacacctgaaatagaacactatgcccgcgtggcagggtatggacttatatccgggcagggaacttcttacggtacaatcattatccgcttgaaggactggagtgaacgaaaaggtaaggaacatagctcggatgccgtggtttcccgcctcaatgcacaattccaatctttaaaggaagcgcaagtattcagcttccagcctgccatgattccgggttacggtatgggtaactccctcgaactgaaccttcaggacatgacgggtggagatttggctacgttctatgaagcggctatacagttcctcggtgctttgaaccagcgtccggaggtagcaatggcttatacctcttatgctatcaacttcccgcagatatcggtggaagtggatgctgccaaatgtaagcgtgcgggtatttcgccaagtgcggtgctcgatgcagtggggagctattgcggtggtgcgtatatttccaactacaatcagtatggtaaagtatatcgtgtgatgatgcaggcttcacctgaatatcgtctcgacgaacaggcattgaacaatatgtttgtacgcaatggcacggagatggctccggtaagccagttcgtaacgctgaagcaagtgctgggaccggaaacggccaaccgtttcaatctttacagtaccatcactgccaatgtgaatcctgccgacggttactcttccggtgaggtgcagaaagtcattgaagaagtagccgcacaatctttgccggcaggctacggatatgaatatggtggtatggcacgcgaagaagcaagtagcggtggtgcgcagacggttttcatttacgccatctgtatcttccttatctatctgattctggcctgtctttacgaaagtttcctcataccgtttgccgttatcttctccgtgccgttcggactgatggggtcgttccttttcgccaaaatactcgggttggagaataatatctatctgcagacgggtgtgattatgttgatcggtttgctggctaagacggccattctgattacggagtacgccatagaacgtcgccgcaagggaatgggtatcgtggagtctgcctactctgccgcacaagtccgcttgcgtcctatcctgatgacggtgttgacaatgatcttcggtatgcttccgctgatgttttcctccggtgcaggtgccaatggcaacagttcgttgggtacgggtgttgtgggcggtatggctgtcgggacactggcattgctctttgtcgttccggttttctacatcatctttgagtttttgcaggagaaaatccgtaaaccgatggaagaggaaccagatgtgcaggtgcttttagagaaagaaaagagtgaagttgaacgcgaacgtaaataaatgaaagaaagaatgaagaagaatatcatcacattagttgccatcagtctgtcgttgagcggttgtggcatctataccaaatacgaacccgccactgtcgttcccgacgatctttacggcggggaagtggtgaccgaagacactgccggtctgggtaatatggactggcgggaactcttcaccgacccttatctgcaatccctcattgaagtgggattgcagaccaataccgactatcagtctgcccagctccgtgtggaagaagcacaggccgtactgatgtccgccaaacttgcttttctgcccgcttttgcgcttgctccgcagggaacagtgagcagtttcgatacgcagaaggctacgcagacttattcgttgcccgttactgccagttgggagttggacgttttcgggcgtatgcgcaatgccaaaaaacaggcgaaagcactttatgctcaaagcgaggattatcgtcaggctgtccgtacccagttgataacaggcatagccaatacttactataccctgctgatgctggatgagcaactcgacctttcccgtcagacggagacggcatggaaagaaaccgtggcctccacccgcgctctgatgaatgccggactggcgaacgaatccgctgtgtcgcagatggaggcggcctattatcaggtgcagggttcggttctcgatttgcagcagcagatcaatcaggtggagaacagtcttgccttattattggcggagacgccacgcaactatgagcgtggtgtattggcaaagcaacagtttcctgccgacttctcgatagggattcctgtacggatgctttcttcccgtccggatgtccgctcggcagagcggacgctggaagcggcgttctatggcaccaatgcggcacgttcggctttctatccttccatcactttgagcgggagtgccggatggacaaactccgccggggcgatgattatcaatccgggcaagtttctcgcgtcggcggtaggttcgcttacgcagccgctctttaacagaggacaggtggtggcacaataccgcattgcccgtgcgcaacaggaagaagcggcgcttggttttcagcaaacgttgctcaatgccggtagtgaggtgaatgatgcgttgattgcctatcaaaccagtcagggaaaaagaatcttgctggataaacagatcacttccctgcaaacggctctgcgaagcactactctgttgatggagcatggtaatacaacctatctggaagtgcttacctcccggcagtcgttgcttagtgcgcaactctcgcagacggccaatcattttactgaaatacaaagtttaattaacctataccgtgctttaggaggaggtcaggaataaactgtatcatactctctgttttctaatttaatgaaagaagggctgccggagaagtgattctgtggcagcccgtttgttaatcggtcaatatcggtcaatatgcggcgaattggcttgcagccggaaacttcagccagcataaagaataatgatggtattatttaccagccagacctttcttttttctttctttatattgactgggtgtttccccggtatattgcttgaaagccgtactgaaataactcggagtggtaaacccggttttctctgcaatttcagagaagggcatatccgtgccggatatcaatgtaatagctttttctatacggagcttactgatatactcgttcgctcccatgcctgtaagtgctttcagtttgttataaagcgaagaacggcccaatcctacttcctggcaaataaactgaatgcccagattggaattttctatattttcctggatgatactattcagtttaatcaggaatgtttcgtctgtcaggctgatggtgctttcttccggtgtggggattaatcctgcattcagataccttttcttggtatattcccggtttttcaaccggttgcggataagttccattagcatttccacttcgaaaggtttgcttaaatagccgtccgctccattcttgtaaccgcttatttggctttgcctgtcatctctggcagttagcagaatgactgggatgtgactgatattgatattctctttaatcgttttacaaagtttatacccgttcatccgaggcatcatcacgtcactgactataatatcagggacatggcttctgaccagttgaagggcttcccccccgtctccggcgataattatccgtttgaagtatccttcgaacgttcttttcagaaagtctgtcatatccggattgtcatccactacgagaatagtgtatggagtggtgtcgaatacctctttcgcggacggctgcccgctgttatcatccatcatcaactcgttcagataagcttttggctcgcagatgatttcttccggttcctgcctcaacggcaactcaaagaaaaagctggctccggtttcttcattatcctgtgcgccgatagagccgccgtgcagttccaccagaatcttggagtaagacaagccgattcctgttccgctctgttctcccgttccctggtagaagcgggtaaagagcttgtgcgtatccacttgctttagtccacatccctggtcgatgacggagatacgcacccggttttcttcgggcagcagttccgaagcaatcgttatttccgtgtcctgcggactgtgtttcaaagcattgataagcaggttacttaggataatctcgcatttgtccttatcgaaactgactttctctatccgtgggtcgagctgatagcggatatgcacattctttgcttccccctcactgataaaatcctgcgaaatgtgttcaatccattgattgagtggatgaggctgaatttgcagtttactctcccctacttccattttccgtacgtcgagtaccatattaatcaagttcttcatccgttgtgcctgccggtagatggcttttaacggcagatattggctgtctccggaagagagcgacttcaaaatctgattgagtggcgcatgaataagcgtcagcggagtccgtagttcgtggctgatattgataagaaaacgtaccttttcctcgtacatctgtttctcatgctctttcatcgcccatttcagtttttcctgattacgcttcaatgttctgcggaaagtttcgatgattatggtggcaatgagaatggcacaaccaagaatgaaccaccacgtgcgataccacggtgggagtacggttagttccagtattttctggttgggaatccaactgccgtctttcgctgtgcatgaagccataattttgtaattgcccggcggcaatgaccggattaccaattccggctggtacgattcgatatactggtcgttcagcccctctatccgatagcggtagactttcttacggaagatatcctcttctttcgacatgattcggatggtgatattgctgtcccatgggacagagattgctgccggatgactatatagtttgttctgtgcaggctcaccattgatgataatatccaacagttgcagttccggcatttccgatgtattcagcagcaactggccgtcaatgcgcagcataccctttacaccgccgatatagacatccccctcattgtttaccaaccgggcgttgggcagatattcgttttggatagctccgttcgactctccgaagagaacgaacttctgttcctgtatgagccaggcgaaaagcagattatccgcacctatccatactttgcccctctggtcgcattgcaccatgttgacttcggtaaacaggttggtaaggatgtgcgtctgcttttgggaaacggggttgtagtggataaggccgaaattgcttcctatccagaaatcgccgtgctcgtcgtgtgacgccgaactgattacggtatcctgataacattcgaaggttgtttgcagcaaggaatccccatcgtgcagttcgtagatatgtttgaaatcgttgatgtaagtccggttgttctcgtgcttgaaggggacgagcgtgccgacaatacttttcccttcttctctggtgaccttgtcgaatttcttttctttcaggtgatactggtagacatggtcgcccagtaataacacggtgttgggggtgttctgatataagttgaccgatttaccccggttgcaaagttgtgtcgtagtttctttgtcgacaatggtaaaaggctgtttctccccggttgcggggttgaatatgaatactcctttggagaaaagggaaatcagtagttttccgggagtgaatccgctgataaacgctattttatcgttccaggtagaaagataatgggtgaatttctcggtacgcgggttaaagaggttgataccgccgccgtccgtaccaatccagatactgtcgggcgattggcggtaaaggcttcgcacggtgctgttgcttagtccgcggtcgtttccggggactacgtcggtgtaggttttcatgaacacttcccggatgctgatcaatccgttgcaggtgcttcctgcccatatattgttgttgtggtcgttgtgcaggcagagaatagagttggcggggagagagtagttttcacgtcccgggatatattccagttggaagatttccccggtttcgggggtgaggatattgattccgccgccgtccgttcctatccacagttgcccttccctttcggcgaggcttaggacgatgtcgttactgagggcggagttgcgggtggagtacgaagccagtagtttgccgtcgtatgagtagcaacgaagtccgccgctgtaaggagcaatccatattcttttccggctgtcggtcatcatggtggtaatttccggcccgcagtcgaaaggggggcgtctgtgctctccggtatgcagatctacgaggtatatgcctgtccaacggctgcaacagagcaacgtctttgaatcccacatactgagagcgttgattttaaaagagttggcgttgaaatattgcagaagccggagagaagaatcgtcataactatatttgtaaatcctgtccttgccgccgaagaggattccgtccgggacaaggcagaaagaataggcggtgatatttttcccgtcctcgtccgtggggaacgtgaagtcgttgctctgctgctggtagcgggcaatacctttttcagtcagtacccagatattgtgttgcttgtcttcggcaatctgataaatcaggttgtggagaagcgagttcgggtcgtttgcctggtgtttgtatcttttcagttcgtgcccgtcgaactttcccagtcccgatttggtgcctatccatacgaaaccttgctcatcccggagaatacagcgcacgttggacggcagcccttctttcagagagatttgtttaaagtaatagtgttctgcccggagagggagaacaccgactaactgtatgataaagaaaaggcttgacagaacagcgtattttgttttcatgtgaagcaggtttgtttgtgatgacagatgctttctttatagaacggtcaacctgtctccttttaaagtgatttcgtatttcttctcttttacggtcttgaacttgagcgtcatgtctccgtatcttacgttgcagggaaccccggatttggaatgaatgatagctttctccagttgtccctctttccaggagacagaaacctcaaaattccctttggcgcagattccgcttatcgagccgtttgcccaggcatccggcaaagcgggaagaagttggatgaatcccatgtggctttgcaataacatctcggttattcctgccgtaccgccgaagtttccgtctatctggaaaggcgcatgggtatcccagaggttatccaacgtaccgtttttcaacaaattgccgtacagtttatacgcatggtttccgtcttgcagtcgtgcccattggttgagtttccaacccatgctccagccggtagcgccgtctccgcgatgttccagtaccactttggctgcctgtgcaagttcgggggtagtcacgggagagatggtatgtcccggatgcaatccgaacaggtggttgacgtgccggtgttcatctttcggatcgtctatgtcggtagaccattccagtaactggccgtagcgtcctatgcggtacggaacgagtttggtcaatacgttttcccattgcttgcgctctttggcgtccgttccgagtaccttgcttgcctggatagcgtccagtaatatttcacgtactacggcatgcgcgaaagtgactccctcgtccaccggaccgtgttcgggagaggtggaaggcgcggcggtgtaagtcccgtcgggcttgtgccacaagtggtctaccgcaaactgtgcgctgcttttgataaggtcgtagccgatttcctttaagaatttcgtgtcacgcgtataatcataatactcccatatatgcgttgccagccacggaccggcagtaggattcaggttccatgccatagatttgctggataagggagctgtgaatccgaagatattggcagagatggacgctgtccacccgcgggcgttgaaataggcttgcgctgttttctcgccaggttttaccagactacgtataaagtctatcaaaggccatgtacattccggaagattggtggggcacgcaggccagtagttcatttgaatgttgatattattgtggtaatctacccgccacgggccgtcggtattgttgtgccacaatccttgcaggttggcgggcatattgccggggcgtgaactggctatgagcaggtaacgtccgaactgatagtataattgttcgagctgatagtccggcgtacctttcttatagttagccagtcgtttgtaggtcggcaggttgggactgccgatttcctgattaatttcaaaacgtacccgattgaacagtgcggtataatcggcttcgtgattacgataaagctcgtcataaccttttttcaggacattgttcatcatagccagagtcgtttgtgacgggtcgttgccgacgtaggctttcgggtctttgaagtccggggcaaagttcatcttataatcggtgtctgccgtaagcaggaataccacttcgtcagcatccttcacaataatccggtcgttttctgctttcagtgttccccctttgtggatagctttgattcggaaagcgaatttcattccgttgttattgagaactccggtatatactaatccgtcgtttccatctgcttccagatggctttttgcttcgttgttgggacaatagctaagcacaagattctgttttccgcctttgtcggcagtaaacttcatgaccatgacactgtccggataggatatgaaatattttcgttgataccgtatcccgtccttatcgaattgcaccacggccatagccgaatccaatgacaggatgcggcggtaactgctcatgttgatttcgctgagtccggtttccacataaagttctcccatcgtggtaaaagcaccgaagcggaacggagtctcgtctttttcttcataagctcccagcccgttgaagttttcttgtgtgagataccccgccttttgggaatctccgtccagaaaagcctgtcgtatttctttcaatacacctgccgactgtttgtttacattccaataatattcggcgcctttggcagtattcggtccacctttccaaagcgtcttttcattcagtgtgattcgttccgcggatatggagcccatgatatttgctcccagactaccattcccgatgggtagcgaacggctttcccatgtcttgtccggattcgcccctgtgcccgaagcgcgtagccagacagcttgtccgtcgagattgttgggagtgtcgaaccatatggaaagtccttgtgtataatccaccgtttctattgatgatgcagtgagtgaaaagagagtgcaaaaaataaggaagcagagtttcttcataagatgtattatttataaggaatgtgatgtgcaaaggtattgtttttttaggatttcagcgaacggcctgctttcgattataaccaataagcttttaaaaatcaccaaaagtgcttctttgtgtaggtagtaagatgtttctaatgagaaactgtatgacgaagggcataaggacctcattgtaatatcgaccaaaatgaacatgtttatagataaggtccgtaagaaagcaacgatgatgaatccatttcctgtggcagcccgctttgtttcaataatgcaactttctttatgacagttattacctaaacagtttctgctataaatctcatccggctaatagcatgaaaaaataaaaggatttatgtctgtcacttcaatgcggcaatctttcaactttctttccctttctttgttctttctgctgaaatatgctacttttgtattatcctcatagatatgagaactaaagaaaggaacaaatcatggaagaagtaaaaagaatcccttatggagtttccaactttgtggaagtggtggagcagaaccaatattacgtggataaaacgatctatctgcctttgttggaagagcaacccagtaatttgttctttatccgtccccgccgcttcggcaagagcatctttctgagtatgctccgggcttattatgacatcgctcaaagagaaaagttcgataaacgcttcggcaatctatggataggcagtcgccctacacggctgcaagggactttccagatactctttcttgacttttcccgtgccagcggtggtagtggtacgttggccgagaacttcgaccgttactgctgtatggtcatggatttgttcggtatgtcctatgaatcttattattttccgggatttgctcaggagatgaaagcacagcccgattttgtaagtaaactgaattatctgaatcttcatgcggctgaaaccggagcgcatctttatcttatcattgatgaatatgataacttcaccaatgtggtgttgaatgagcagggcaaggaagtctatcatgcgctgacccatgctagcggcttttaccgtgaaatcttcaagaagttcaaaggtatgtttgagcgcatctttatgaccggtgtcagccccgtgacgttggatgacttgactagcggatttaatatcggttggaatatcagtaccaagcaccagtttaatatgatgctgggattcagtgaaacggatgtgcgtgagatgctccaatactataaggatgccagacagttgccgggcaatgtggatataagtgcgatgatagaggaaatgcgtccgtggtatgacaattattgttttgccgaagaaagtctggaacgtgacccgaagatgttcaattgtgacatggtgctctattatttgcgcaactatatggatttgggcaaatcacccaaagagatgatagaccccaacacccgtactgactacaacaagatgaagaaactcatccgtttggacaaattggacggtaatcgcaaaggcgtgttgcgcaaaatcaccgaagaggggcagattatcaccacattgacgactacctttcccgctattgatatcaccaagccggagatttttcccagtctgctcttttattacggtatgcttaccatcactgctactcggggcaactatctggtgttgagtattcccaataataacgtgcgtaagcagtattacgaatttctgttggaagaatatcaggataaccggcatatcaatctgaatgaccttggcttgatgtattatgaaatggcttacgaaggtcattggcgtgaaacgatggaatttattgctcatgcctacaaggaaaactcttccgtgcgaagctccatcgaaggcgagcgcaacttgcaaggcttctttactgcttacctgagtacaaatgcctattacctgatagctccggaactagaattgaatcacggttattgtgacctgtttcttatgcctgacttgatacgctatgacgtgaagcacagctatatcatcgaactgaaatacctctccaccaaggattccgaagcgaaagccgaagcccaatggcaagaagctgtagagcaaataaaaggttatgccgttggtgctaaggtgcgtcagatggtgcacggaaccgagttgcattgtattgtgatgcagtttcgcggatgggaactggaacgggtggaggaagtcatgcagaaataagctcaatttatactgtcatttctcattttaggcaaaatatatctgtaattcccttatttcaacaaagagttgtctgattgccagactttgtatgataaactaatttatgcgctaaatctatatatttagcttggtaggcatatatactcaccacgtgggcttatggttgcttacctgtggactggaaatattttagacagaagaacataagaacaaaagataaagcagttatgtgtaattattattgtaataaaataagtgttaaagatgactcaacctattaaaatggataaacagatttcttaaacattccaaacgaagagtatgattctgtaatatattgatatataaatatttatcttttatctttttccctttaaaaccaacgacctgttgcacaccgagaaacaaagtgttcgacaccgagaaacacatcgtttctcggtgtcgaacaaatcgatagataaggctcggagtatagaataaacaaatcgtccgtctttttctattttatggattattccatagatatatgcatcaatatatattcccataattaccctattgcatctgaaatgtaatattatagagtatggtaccgattttaaactaattttttgaaaaacaatcattccccccgatgaaatggtttgatttggtgaaaagtgaatatttaatggctatttttaaaataactctttttaaaagctaccctacctttgtgacaagaatgttagtcggaaaagttatcccggttcttcattcttaaatctaatgcctgtgagatttattttgttcgctaatagaaatatgaatctttattattaaatgtagtattatgaaaaaaaagaagcttatgaagaaacaaagctgctttgttgttcttttgatgatgctcctgttatttccttcgggagcgtttgcgcagcaacaaatgattaaaggacaagtggtggatgataagggggaaaccattattggagctacggtcatggtaaaaggggcaaaagaaggtacgttgaccgatattgacggtaacttttctgtcaaaggtaaagtcggcaataccttatctatctcttatgtcggtttttctcctctcgaagtaaaagtgacaaaacttgaaggtaatcgtttcatattaaaggaagactcgaaacttcttgatgaagtcgttgtggtgggtatggacaagcagaaacgtaataccattacggctgctgtgtctactgtagcttccgatgctatagtcaatcgtcctgtaaccgatttgaccagtgcccttcaaggtaatgtagccggtctgaattttgtgaccgacgcagctcctgacggcgttggtggtgaaacaggcgcggaaatcaagttcaatatccgcggtgtcggttctattaatggtaacgggggcgagccttatgtattggtggacggagtggaacaaagccttcagaacgtaaatccaaatgatatcgaaacaattagtgtattgaaagacgcttctgccgctgccgtatatggtgcacgtgccgcttatggtgtggtattagtaactacaaaaagcggtcggcaggaaaagacacgggtttcttatcgaggcacagtaggttttagttcacctatcaatatgccggagatgatgaactctcttgagtttgctaaatatgtgaacgaacggaatgataatgatggcgtgaatcataaattttctgacgctcttatagagaagatggaaggattcatgaagaacccctattcagcagaatttccaggtataggtcccaatcaaaacgggacagactgggcttcttcaatggatgcggtatatgcgaatacagattggtttgattattattttaaagatactgctattcgtcattcacataacctgagtgtaaccgaaggttcggaaaagttcaactattatgtaggtttgggttacacttatcaggatggtttacttgacaaggtagatgataacctgagcaaatataatgtaaatacgaaattccagattatagccaataaatggttgaagttcaatttcaataataatataacattgagtatccttaaaaggccgatggccaaccagaccatcttttatggaactcttggacaaacaataccaaatgctcctactcattatccgattgattcggaatataatgatgcttctgagttccgttatctaaaagaatcccattatgtacagaaccgcatatccgatgcaatgtcttttgctgctaccattaccccgttaccgggttgggatattgtaggggaaatgaaagtacgttttgatgtagaagacaacagtttcaaacgtggataccctacagtagaaaaacctgatggagagttaaaggttgacataggtaccaagcagggatatgtatatccgggtatggaatggaagaattccaaatggggttcttatactcgcggtaatgcatttaattattatctttctccgaatgtatcgacatcttacgtccatacatggggagaacactacttcaaggctatggcaggttttcagatggagttgcaggaaaactccaatggtttcacttataaggatggaattttaggtagtgatatttattcatttgcgaactccaatggtacattgtctgccggtgaagaccgtactcattggtccacaatgggtatgtatgccaagttgaactggaattatcaggagacatattttctggaattcagtggacgttatgacggttcttcccgttttgctcccggaaaccgttggggattctttccttccttctctgccggttatgatatagctcgcacaaactatttcaaatcatggaatcttccattttcccagttgaagttgcgtgtttcttacggacgcttgggtaatcagaatggcgccggattgtatgattatcttggagtgatggatttggtgtcaaactcatccaatgcttggttactgccgggagtaaacgccactcctgccaaaggaatgattgccaaaactccgaaaatggtcagtccttatattacctgggagaaggtggataatgccaatttaggtcttgacctgctgttattggataaccgtctgacaataactgctgatatttaccagcgtacaacgcatgatatgattggtccggctgaagcaattccggctatcggaggtatcagtaaagacgaccgtgcaaaagtaaataatgcgactctccgtaatcgtggttgggagttgtccgtcaattggcaggatcaattgaaatgcggattcagttatggtgtcggttttaatatatccaattacaaggcagtagtcacgaagtataataatcctgaaggactgatattcaataaccataccggtctggcacgtaacagagggtattatgagggaatggacatcggtgagatttggggatatgaagctaatgatcttttcatgactaaccgtgaagtggatgaatatttgagaacggtagaccttagcttctttaaagctgacaaccagtggcaacgcggtgacgtaaaatatatcgactccaatggtgacgggaaggtagacccgggaaaaggaactttggcggatcatggtgatttgaaagtaatcggtaatacaacccctaaatattctttcggtattaatctgaatgcaggctataaaggatttggaatatcagctcttttccagggagtagccaagagacaattcccgatggcaggtgctacttacctgtatggaggaaattgttacttcaaagagcatcttgattatttcaatgcatggcatcctgatggatatttaccacgcctgacagataattctaaagacaaagaagtgaatataggctataatacaactcgttatttactcaatgcagcttatatgcgtctgaagaacttgacagtctcttattctttcaaaccacaattggtggaaaagattggcttgagtaatttgaaagtatatttcacttgcgataatctgtttacaatttccaagttgccgcaacagtttgaccctgaaacactgaatcaggtgaatggttgggtaggaggtagtaatgcttctgctcccgcccttacttcaccgctgactgcaaatggtaacgggcgagtttacccattgaaccggaactttgtatttggaattgacatcacattttaattagagaggaacatcatgaaaaagaaaataattatactgactgcttttatagggctggtgttgtccgcttgttccgactttttggatcggcaaccgttgacaatgcctgaaaacgaaggcttcctggctggtcgcgaacaagtagagaactatatcaatgctttatatacttcattgccggctccgacgcaatatggaatgagtgtccgtggtgaagaggtgaacagcgataacattttggctgaaaaatatgacagacgcctgaatggtgagaataatcagttcagtggctcgaccgattgggaaaaaggctatcagaacctgcgtaatgtcaactacttctttcactattataaagttgatgcaggacttgagactgctgaagtactctcgcttagaggagaagcctattttttgcgtgcttattggcatttctacctgctcacccgttttggagatatacctataatggatgatttttgggatgaaaacgctacggtagccggcttacagaaacctgcgtccaagcgtgcggatgttgcccgttttatattgaatgacttgaaggccgctatcggtgaaattccggaagcacgtgcaaatttatttacgcgtagtaaatatcagggactgcgtatcagtaaggaggccgctactattttggctatgcgggtggcgctttatgaaggttcgtgggagaaataccacaaaggtactaagtttgcaacggaagacaattctacggaattttttcaggaagtattgaactggggagaccagcaactttttactgctggcttgacattgaatacgaaagacactgataaggagtatgtaaataccgaagatgcttttgcacacttatttaataaggaagatctttctcaaataccggaagctgttctgtggaaaaagtattcagtggctgatggtgtctttcataatttgggtggtttactcgcttcaggagcagtagatggccagggaccgtccggcctgtcaaagtcattggtggataactatttaaatgccgatggaacttttattaatcccaaagacgagaagttcaaggattttaatgaaacatttgagggacgggatgcgagacttctcgttacagtaatgcataccggatgtaaatatcgctctaatgcaggttcttcttccaataagccgatgaatgtgagggcttatgatgcgacaggcactgatgatgaaatgaaagaaaagaataaagatattgtctctcctaacttgaacggcgacggtaatagcaagagtgttaccggattccatatcagattaggtattgacactacttatgtggaagggaatacgcagactggcattatcctgttccggtatgcggaaggattactttgttatgctgaagcagcggcagaattggacaaatggagcgacgatgtattgaacaaaacattgaaacccttgcgcgaaagagcaggcgtgacatggatagagccgcaagcagatgctaatttcccatttaccgggcttactcccttgatacaggaaattcgtcgtgaaagatgttcggaactggcacttcagggattccgtctggacgatctgatgcgttgggcggaagccggaacattgaaaggaatcaacggtcgtggcaggggtgcatatctgggcgaagagagtgtcctttacaaaagcttttcacccaaagggcgcgaatcattggaattggtattgaaagataacgacgggtggatggatccgttacagcaatatttgcctgagggttaccttttcgacctgaaccgggattatttattaccgataccaccggatgaactgcaattaaaccatgaattgaaacagaatccgggctggggagatgttagcgaataagtatctcaatttaataaattacacaattatgataaaaagaatactatatacatttttacctgtttgcctgctttcaataggttttgcagggtgcgaggacgatgcggtagaaccactgccggaaactgtacctttaatagtggaatcaagtgccaagagctttgtaatgggtgaagagcttacccttactttgaaagtgaatgacgctaagaatccggaacgtgtgacaaacgaagattttgatatttatctgactgctaaggacggagaaaaagatgtatcaaagacagcctttaaagcatttccttcaatggttaccttcccgaagggagtcagttcttttgatataaaactaccgattacagaaagtggaattaagcccaaacaaaagttgtatgtgaatgtaatgtcgtttgtacgtggctatacggtgactaatccaactcaatcgattgttatttctgatctccattacacagttgtatcaataaaaaataattcggacagggttattgacgaaggtgatgagtttactattttggcagaagttcctgtgccggtcacggatgatatggatatccatatcactgtacctgatgagcaaaaagatttctatgtaacgttaccccccgtcacattgacgataaaggcaggagaaaaatctgcagaagtgaaagttaaaactaaacacaatatggaacctaccaaaacggaaacgttgactttgaattttacgaccgtttctgcagttcatccgttggataatgaaacattggaaattacgatgaaggacctcgaagctgaaaagggagatgggattcttgatgagcgttgggtttacgaacgtccgggaattgcatttgcttcaagtggcaggttggcagcagccaagacacaatatggagatgataaggttgttgaaatgaaagaactggatccgcatcccaatacagatttagctacggcaggctggaagttctacaatgcatgggaattccatagtttcggaaatacaggtgatatgtggaatactaatggtgcaggtaattcatggggtaataaagttcctctgtttttggcagatcgtaatacggtgattgtacagaatcatgcggcttgtgtcaatgtgcaattctctaatataaccgatcaaggatatctgaagatgatagaaatgaaagttccgtcgaagggtacagggccggcagcaggaaaagatagggattatggtactgctgctttctatggatgtggagttaatactacatataaagctaatagtcagttaatatcagaaggttgcagaatggaaattcgtgcccggcttcgtggtgagaaaaatggctttaacatggggatttggctgatatctgatgagtcgggtaaatataatacttacacggaagttgatattctcgaaaatccgacaggtcctgttacaggaaataaagcgcatcagacattccatacgggaatttcaggaaccgataaaaaaactcaaactgcaaatcatacgataaatataaatgaatggaacatttattggtttgagtggcgttctgattcggaagtcgcactgggcattaatgggcaagagactgtatgctataaaaaagctgattgtcctgcaggctattggacttttacagatgaacaaaacttaaatgggttgaaatttattcttaccatgggagcacctaataaatgggggcttggaggtggaactgaggttaatggtgtatggtctcctgatgccggctgggattctggttttgcaagctatgataattatgaacgggatcgtgataataatgctattcctcgtttggaaatagattgggttcgtacttatataaataaatcttcagtagcagagtatgaccaaggtagaaataggcatacaggaacgaagttttattaattcttagttgccttaatcaaatttcgcaagtgccttattcagtcttcaataaaaaggggcaaagaggtacttgcgatttttttaataaataaactgactgtcaaaccatgacgaaatacatcttaatcatttgtatgctgtttgcatccatatcgggtgcatgcgcggacaacttgacatcaccccctgtttcaatagttccccgtccggtgcaggtcgtgccgggcgagggtaacttcaccttctccgcccgaaccttgttttcggtagagaaccatgagcaggctgtcatcgtccgcaactttataaacttattcaagagaagttcgggaataaccccacagttggcaataggtagcagtgagaagagtcatgtccgttttacgactgactcttctttaaaaagcgaagcctaccagttggagattactccggagcagatacaagtaaaagcatcggatataaaaggctttttctatgcattgcagaccatccgcctgctgttgccgtcggctgtcgaaggcaaccgtcgggttgagaatatccaatggagcattcccgcggtaaccattcaggatgaaccgcgcttcggctatcgggcattgatgctggatgccgcccgcttcttcattcccaaagagaacgtgttgcgtatcatcgactgcatgggcatgctcaaaatcaatacgcttcatttccacctcacggatgataacggctggcgggtagaaatcaagaaatatccccgcctgacggaagtgggtgcatggagagtgaaccgcatggatgttcctttctatttccgccgtaacgccgaaccgggagaaccgacccctatcggaggattctatacgcaggaagacatcaaggaaatggtggcatacgctgccgaccgccagatagaggttatccccgaaatagatatgcccgcccacagcaacgccgcactggctgcctatccgcaactggcttgccctgtggtgaatagttacattggagtcattccgggcttgggcggaggaagttcgggagtgatttactgtgccggaaacgacagcgcctttacatttctgcaagatgttctggacgaagtgatggcaatcttcccctcgcgatatattcatttgggaggagatgaggcgcagaaaggattctggaagaaatgcccgctttgccggcagcgcatgaacaaagagcatcttgccgacgtagaagatctgcaaggttatttcatgaaacggatgagcgactatgtacgcagcaagggacgcgaagtgataggttgggacgaactgacaaacagcagtttcctgcccgaaggcgttattattcaaggttggcgcggactcggcgcggctgccttgaaagctgctgaaaaaggacaccggttcattatgactcctgcccgcatcatgtacctgatccgctatcagggcccgcaatggtttgaaccccagacctatttcggcaataacacactgaaggacgtctacgattacgaacctgtgcaggcggactggaaaccggaatatgcttccttacttataggcgtacaggcatccctatggacggagttctgcaacaaaccggaagatgtggactatctgctctttccccgtctggccgcccttgcggaagtggcatggacgaagaaagaacgcaaggattggacttcattcctgaaaggactggatgtctataatgaacatctgacagctaaaggtatcgtctacgcccgttcgatgtacaacatccagcatacggtcactccaaacgacgggatgctcgaagtgaaactggaatgtatccgccccgacatggagatacattatacgacggatggaagcgagcctacggcaacttcaccgctctacgaaaaaatagtgcctgtaaaagagccgcttacactgaaaagtgctacttttgcgcaaggcaggcagatgggaaaaacattgatactccctgtccggtggaacctggctaccgccaaacctgtatcgggagacagtccgtctgtaaagctcctgacgaacggaatacgtggaagcttgaaatattcggattccgaatggtgcacttggaatgataatgattccgtctcttttacaattgacctgctgaagccggaaacgctgaacacattgacattgggctgcatcacgaacaatgggatggctatccataagccgtcgtccgtgaaagtggaagtttcggatgacaactctagtttctgcgaagctgccatgcggagtttcacgcccgaagagatttttcgtgaaggaaactttatagaaaacttgccgttgaagctgagaggtacacaagcgcgttacgtacgtgtgacagccaaaggcccgggagtttgtccggcatctcatgtacggccgggacaggtgtcgagaatcctttttgacgaaatgatactggaataaggcaaagggtacaaacatgaataaagcgacattggataaaacgataatcaagtttatacaaaagctatacttatgaaaaacaaattaccggaaaacaattccatccgtcttgcctcattggatattctaagaggtttcgatttatttctcctggtcttttttcaacctgtattcgtggcattggcacggcagatgaatatgtcatttctcgatagcatactttatcagtttgaccatgaggtttgggagggattccgtttctgggatttggtaatgccgcttttcctctttatgacgggagcttccatgccgttctcactatcgaagtatatagggactacgggaagttattggcctgtgtatcggagaatcctgaagcgtgtttttctcctgtttatcttcggaatgattgttcagggaaacctgctcggtctggacgccacgcatctttatttgtattccaatacattgcagtctattgctgtcggttatcttattgctgcggtcattcagttgcacttcccgttcaagtggcaggtagggataacgttgctactccttctcgtctactgggttccgatgacgtttttgggggatttcacaccggcggggaactttgcggaacaagtggacagatgcgttttagggcgattccgtgacggtgttttctggaatgaggacggaacctggagcttctcgccatcctacaactatacatggatgtggagcagcctgacattcggagtgaccgtcatgctcggagcgtttgccggaaagataatgaaagagggcaaggcaaatcggaaaagggtggtgcagacgttgctagttgtcggacttgctcttgttggcctggcgttactgtggagtttgcagatgcctgttatcaaacgtatctggacaggcagcatgaccctgctttccggcggctattgctttctgctgatggcattgttctattactggattgattataaaggatatacccggggattgaactggctgaaagtgtatggcatgaattccattacggcgtatctgctgggcgaagttgtgaatttccgttgcgttgccgcttcggtcagttacgggctcgaacaatatctgggtggttattactccgtatggcttaccttcgccaattatctgattgtctttctcctgttgagggtgatgtataagcgcggattatttttaaaggtttgataaatgaaagaataaaaatagtatgattaaacgaatatatttgctgttgatgttgtttggaggatgtttgttttccatgagggcagctgtaaaggaagagatttatgtcaatcatatagcagatactgtggagattggcaatgaattcctcgctcgcaagtttctggtgaagaatgataaagtccgcacgtgcatgattgaaaataagcgtatggggaaggaagtttcccgtattattcccgaaaccatttcggaggattttatcatccgtacgttgagtgcggattcggtcgttgcggatattcattcttctgatcttttcttgcagagagtacaggtcacggatgaagggaagaacggcaagaagctggttttccattataagggcttccgccatcaggaggtggactggcaggtggacatggttcttacattggaggaagggaagcactatatgaggaaatatctggagattaccgtccccgattcgcaacgccatctggcgcgtctggattatattgatttcgagccgatgagccttcccgaaggatatgctgtctggacgcatccggtgatggaacagggagtgggcggtgtcagcggatattacatctctttggggcaaccggtgtacatacagggcatgttcttcggacttgaatttccggcttcggagacggagattgagggtgatcggaaagtacgtatccgctattattcgggaaagagctttgagatgcttgcttcggaaggccgtctggcggacagcgggacgtttaccacctggaaagaagtgaccggtgccacccgcagtacggatatggatgtcattcagacggactttttcagttatatccatgatatttccgttccggtcgacttccgtatccagtacaattcatggtatgactttatgctcgacatcaacgagaacaatatcctcgactctttccgtgaagtggaacgcggactgacgcagaacggagttcgtccgattgactcttatgtggtggacgacggttggaatgcttacggtccgtggcaggaagagaacaaggccaaattctggtcgttcaacagcaaattcccgaacgaactgtccaccccttcggatttgtcacaccgtttgtcctctaatttcggattgtggctgggcccccgcggaggttataattattatatcaagttcgcgcggtttctggaagaaaacgggaatggaaaactgaactgcaactcaagtgatatttgcaccaaccataaggtgtactgcgagaaactgaaaatgttttttctggactgccagcaacggtttgacatgaattactggaaactggacggttttctggttcgtccgccgcaacccgacccgcaggggaattatatctccggcggttatcagggaatgtgttatgtcaccgagcattgggaacgttggattgatatatttcaggcgatgcgcgaccagcgcggggcgaaaaggaatgatttgtggattaacctgacgtgttatgtcaaccccagcccgtggttcttgcaatggggaaactccgtgtggatgcagaactcgcaggacatcgggcggttgaacgtaaaacgcccgtcacagcttgaccaacttttgtcttacagggacgaccgttatttcgattttgtgaagacacgcgcgttccagttccctttggcgcatctttataaccacgacccgatttatggcaataccgccaatctcgccggaaagatggatgatgatgaattccgcacttacctgatgatgatggctacccgcggcagtgctttctgggaactttattatagctataacatgatgaacgaggggcagaaatgggtgataaatgccgatgtactgcactggattaacgacaactatgagactctgaaacatgctaaactgataggacagactcccgcaaaaggaactccttacggctattcggcatggtcgggacaggaagggattatttctgtccgcaacccgtccgatgaagtgaaagagtttaccttcccgctcgaccgcactatcggaatgcctgaaggattgaaaggattgcatcgtacctatgtgtgggcgtaccggacggatgaacagaaggcagaggacacggagaaccatttgtttgattatggcggacaaatctcccttagtttgcagccgggtgaagtgcggatttggaaattcagtaccgtgcctgataaggaagcccctgctctgcggatagtgaagaccacctctccgacttccctgacggtcgagcttaatgagcctgtgatactgaaagacggaatattttccgtttcgggaaatgaggtaaccgctacttcgctttcagcggacaggcgtgtcgtgacactaacattggctcgtgaaatgagagaagatgataaataccgcctgaatatttcgggagtgacagatgacgcaggaaatacggaagcattgcgcaccgcttttttctatttcgagaatcaggagatacctgttttgacaggagtcagtggcagcggggattttaatctgtctttctgtttgaaaaccgataagaacgctgtttccttgttgcgtcagggaaaagacattttggtggatttggatgcggaagggcggcttgtattcgtggtaaaagggttgaaagtcgtatccggacaggctgttgatgatgataaagagcgcattgtgtctttatgccgtgagaagaatggaatgttgaaaatctatctgaatggtgaattggagcagtcggtttatgatgtggcaatagtgaatccgaatattaaagcaactccggttattgtaaatgcttcattagagaatactctcggacagttgaagattatgaatcgtgcgcttgattataaagaaaacaagaacatggttctgaaataaaagaggttgtgactgtatcaaatagaggtcagcatgatagaataaatgatgataatatcctgtttgcaggagatatagatgctgtgtgttggatatatagatccaacacgcaggtcatatatgccgtacacattggatctatatgtccaatacgcacggtatatatagcttgcaagtaactgataaacagcgttattctaccagacttttcgctctttccaatgctacgttgatattcgggcagatattctcttttcccagcaactcgtagaatccggctttttccagtacattatgcacgttctcgttgactcccgaaagaataatggtagtcttttctttctgcgacatttcgcagagagcagtcaggttatgaatacctgtggagtcgatgaacggaaccttgcgcatacggatgatacgtactttcgggcggtctcccagttgtgtcattgtttcttcaaacttggtagcgatgccgaagaaataagggccgttgatttcgtatacctctatacctttgggaatcatcaggttttcttcgtgtacggtaatatccgattctttattcgggtcaatctcatcggtaatcaccgagatttcggtagtctccatgacacgtttcataaagagaacgcaagcaatcaccaatcctacctcgatagcgacggtcaggtcgaagataacggtcaggaagaacgtgataagcagtacggtaacgtccgatttcggattcttcagtaaagctctgaatacacgccatccgctcatgttgtaagatacgatgaccagtactccggcaaggcatgccatcgggatatattgtgcgagtggcatcaggaagagcagaatcaacagcaatactactgcatggatgattccggctatcggtgtcttacccccgttgttgatattcgtcatggtacgggcgatggctccggtggcaggaatacctccgaacagaggagctatgatattggcagctccctgtgcaatcagttctgtattggaatcgtggcggtcgcctatcacaccgtcggctaccgtggcagacagcagcgactcgatagctcccaatacggcaatggtgatagccaccggaaacagttccctgatagcttcccaatccaacgcaggcacaacggcatcgggcaactccgatttgatggtgaagcggtcgccgattgtctggatgcagtcgatccctccgaaagttttcatcaggtaaacggctaccgtgactacgatgatggcaatcagcgagccgggaattttctttgagaacttcggagtgatggcgataataataatgctgacaatactaacgatggtattccaccagttgatcgtgtcgaagtgtcggaaataaatcagccacttcccgacgaagtctcccggcactttctcgtctccgaaagataaaccgaaaatatcggcaatctgggtcgtgaaaatagtgacggcgataccgctggtaaatccgacgatgataggataaggaatgaatttgatgacagctcccagcttgaacactcctaataatacaaggagtacgcccgccattagcgtggctacaatcagtccggcctcgccgtattgttgtatgatgccatagataatgacgataaatgctcccgtaggaccgccgatctggactttgctgcctcccaacagggaaatgatgaatcccgcaatgatagcggtgataatacctttttcgggcgaaactcccgaagcgataccgaaagcgatagccagtggaagcgctacgatacctacgatgatgccggccatcaggtccgccataaacgtttctttcgaataattctttagacaagaaaccagtttgggtttaaattcaaatagcttcatttttagatgttattatacgtgtactctgtacttttttgcaaagtagaggttgcaaaattagataaaataatcgaaataagtatgtttttgaacatactatttgtctgttgatagatttcatcaatgaggtgatagtttttattcattaagaaaaggtggtttattgtgaacaaatcgtttatatttgcgttataaatagtacgacaagttacgtttggtaatcaaccaatttaaaatatatatagaattatggctaagagtattaaaggaactcaaacagagaaaaatctgttgacttcattcgcaggagaatcacaggcaagaatgcgttacacttatttcgcaagtgtggctaaaaaagaaggctacgaacaaattgcagctattttcactgaaactgccgatcaggaaaaagaacatgcaaaacgtatgtttaagttcctcgaaggcggtatggtagaaatcactgccagctatccggccggtgtaattggtaatacacttgaaaatcttcgcgctgccgcagcgggtgaacatgaagaatggtcactggattatcctcactttgctgatgtggcagaacaggaaggtttcccgatgattgctgctatgtaccgcaatatctccatcgcagaaaaaggtcacgaagaaagatatcttgccttcctgaacaatatcgaaaatatgactgtattcgctaaagaaggcgaagtggtatggcaatgccgtaactgcggttacattgaaatcggtaaggaagctcccgaagtttgtccggcatgtctgcatccacaggcttatttcgaggtgaagaaggaaaactattaatctacggatggatagataaatctcggatgatttagataaagaaaatgccgcttgcagtaatctacaagcggcattttttggtaacgagaaatacaaattgctatctgaatgacagattggcaggatttatctattgattccggtaatccttgggagatacaccgtattgctttaaaaactcccgatagaaataagatttattagagaatccacatttgaacataatctcggatacggtcaacttggttgtccttaataacttggctgcatattccagtctgatgcctcgtacaaattcactcggagtcttatctattatttctttgaacttccgatataaggtagctttgctcactcctacaaattcggcaatagaagaagggcttaataactcatcatctatattattctttatgaagtctgttacattctgtattaactcttcgtcttccggatgaagaacaatcccgtcttttactttcacagaagacatgctggaattgaaatagtcctttaaaagcatttgtctcgacagcagattctctatggtggatatcacctgcctcgggtgaaatggtttgacgatataagcatccgcaccatggttaaaggtattaatctggtcttctacagaagcctttgccgatattcctatgattggaatataacttgttttcaaatcggatttcaatttattaatcaagctcaagccgtccatgttgggcatgacaatatcacttataataatatcaggatgattatgttctatctctttcaaagcctctacgccgtcttttgcttcgtgtatcacataatcaaagaggacatctttcagcaggtctctgatattcttttcatcttccactatcagtatgacagtatctttgcgaggggataagtgatcctgcccgttcttttctttctgcaacgaatctttttcatccgttacaacaagtgaatgatcggatggcaaagaaggaatcacgactgaaaattcaacactttttcccagttcactatttacacttatctgcccgcctaataattcaaccagactctttgttagatttaaacctatgccattgctgacagagttacccaatttaggagtatcaaatatcttatacttatcaaatatctctgccatctgttgttctgttaatcccttaccggaatttcttacgagcaagtataaggttttatcaggctcattttgtgatatctcaacatgaatatatccataacgaggagtatatttgaaagcgttcgacagtaaattgaatataattttttccaaagcattgcggtcggaatagatctctgacgtatcatgagtctctaccttgaagtctattttattctctttcaggatatccacataattgttggaagcatattccatcaatgattttacgttcacattttcaggatgcaaatccatattgctcgatttagttttacgaaactccatcaactcactaatcagcttctgcatcctttcggcattattctttattatttggagatatttctttgtactaccatctaacccgtcctgttccaacaagtgctgtgcaggtgtataaatcaaagttaggggggtaaagaattcatgtgccacattggtgaagaaattgagccgggattcataaatcttctgttcatgccgtttctctacctgggctataagaacctggcggcttaaccgtatgcgatttttgataacagactttgtgatgtagaagataataatgcacaatatggcatagataatcaatgcaggaacgctaagccaccacggataacctacttttatagttaagcgataaatgttatctccccatactttgtcgccatttgtgctcttcacttcaagctggtactcacccggaggaagttgggtaaagataatattcggattattacccatttccacccaatcatccgaatggttcttcaagcgataagcatattcacagttttcattattaataaagtctttggctatgaaattgaaagtcatgaatctttcttcatagctaagtttcaacactccttttctgatacgttcattaatgtcctgtaccgtattatatatcttcaaactacttaatataagtggaggattaaactcgcgcaaatgtatatttcgaggattgaaataactaaacccgcttactcctccaaagtacaagaagtcacgatgatccttgaagaaagctccatcagagaattcatcattctgcaatccgtcattcaaggtataattatctattttattgttttttacattcaggctagacaatccctggttggtactgatccatatctttccttcgtggtcttttaatattccatgaatcgttttattattcaatttctcgtcggcatattgtatcaggtgaaaatcattctcctcctttttcaattcgttcagtccataacttgttcctatccatataccggtatcatcacgcagtaagcacaatacatcattattggtgagtaaaatccgactgtccatatcctccaatgattttatgctgttatctttcatattgatacagttcaagcctccgccacgtgtaccaaaccataacatattgtcttccggatcggatgtaatggcataaacaacatcgttattcaatgagatatttttatccgacgaattatattgcctgaatcctttaacgtgataacgaccttgctctctggaaatatttattttgattaaaccatatcctgatgttcccacccataaaagagaatcattgttcgtaaaataaatgttgtacacagccttgaaaggcggatatttatcaggtatctcaagcttttccagtcgccctgtagcagcattcaatatattgattccggttccttccgttccgataaaaatgtcattcgctttatttcttctcaaggcatagacagaattggaaatcaatcctttactctcattcagataatctgtcaattccttcgttgcaggatttaacagttttattccgcttccttttgttcctatcagaatattaccatcttcatcttcacaaaaacatctcacagggtgactggtgtgaacggtttcaaataaagagtcgtaatgataaagttgaattaatccttgtccgtccgttcctatccacaatatgttctgactaccggaataaagagtgaagactgataactgactggatagttcgttcaggtaggtaaaagtattcttttttaaatcataatgaatacatcccccttctataaagctgacgtacatcttgttctctgctaaaataacctgcgatacaggtttgctactatccagctcaatgtattgggaaattgtaaagtcgggatttaaaaggaaaagtttgttgtctttgtttaagataaatctatctttcgacagaaatatcttatctacaggcgtctgtatgtcgactgtgcgtaaatcactctgttttcctccgttaacgagtagattgtaagtcagatgcacggtatttccattatttaaaaggaaaagcatacgatcggaatcactcacggaataatcctttatatgacttgcaaagtctgtgttaatcggattaaactcatcttcagaatcattgtagacaaagaatcccagcccctttatgaggcagataatatctcctgccgcactctttcctaaaataaaagacttttcctgattgggtactttattatctgttcttaaataataccttgttatctgacgggttcgtttatctaaccgattgattccattatctgttgctatccataaactgcccttacattcgataatctggcggataacgttattacttatagaattcggattgtttttgctatatctgaatgtcgtaatttctcttccattatatgcattcagtccatcccatgtcccaatccagattgtatgttctgcatcttccaaaatacagtttactgaattatttgtcagtccgttaacatttgatatgtgttttgccacattaaaagcataagactttgtggaagtgacaaatgcaataatcagaataaaaaataattgtgcgtataagatgtttctcatgtaaatgaatgttatttatacggttaggataatagcaaatataaggaatttattttattccgcgcatattttcatcggtaacggaggacttatacaattgtggaatagtcaaaattacaaacgataatctacgatttcaccgtcaacaatcaatttaccatgtttctttgtttttttagcggaagcaggaatacaaacaatagttacggcattgtccgggttcaggataatgcttgtttcgccggtacaatttttctttatgtattttttggataccagatcgtacaagtccgtaggttccgtaaagtgttgattcaaggttacctctttggcttcaaagtaaggattgaataaaaggtaagtaggatattttcttgtggaataaaaatctgtggcattacaatccagttgaagaatacattccacattagtagtatctacaatagaggctagcatacccacccaagccgaaccatacaaacaaatatctgtagctgaagacatggtttttacttgatccccaatagcatagggaccctcatcggacaataatccctggaacggttcaaagtgattgccatgatacaaatccttcctcaatccttcatagcaaatgacgtgttgaggatcaccttcccagatagaactcgactgacggttgcgggggtgctcatctgcataaaataaacggcaggcgtttgccaagttcaacatccacttgcctattgtggaagcataagccgggttgtattttacaattgggacaagtgcggcagcttgtgaaaaggtgttcatggcaaaagcatattgttcatcctttttttgtcctaccaatccgtgtacgtcgtatttgttccaacgctcacacatcactccccatccgtcacggtctgaattattaccgtcgaagcaccagttcaacattttcagctcatcataagcagttccaagttccgcattcatgcgcactgccagataagccccatagggcatcattatctcatagaaagttccttctttttcgggacggttctgcaagaatgtcatgcattggcgtgtagcattcagatattttttatctccgtatttaatccaggagatgtattgcaaccaagcaagtcctgcggctgcatccggttcacgccatactttattataataccctttacggttcttaaagttgaaggcggtgaagttgaagtccggatattctctaccttcactcaagtcctggatagcagcataccaattgtcaacagtgatcttcatcggctcctgcatctctgttttttgaggatataaatctaccagcatcgaataagccattgccggccatatctcgtaccagaaactttctccggctttcctgtcgaggccgttcaatataagattggttccgttcttcttgttgaagaattgtcgtatcattgatacataatcttttccgtcatcattgcttttgtctactcctatcagacttgcactaatgagtgagcccatagtgggaagagattcataagaatttcctcctaaccgtcttttatctacgtagcttggaagtccgaaagtacggaatggaaagtttatttgcgaatcgtcccaccagataagaggtaagttctgtcctttggcgttgaaatcgtaaaatagtctgtcctgtttcgtggctatatctttccagtttttcattttataggggaaaggtatattgggcatatactgtactaaacggatctctttttgttctatcggcttttgtgccggcaggttgttgagaaagaaaaaacctgctacgagaaataataatgtctttttcatggtcagttggttgttaaaaaagggcggattttataatccgccccctcattttattcatattaaaaacccggattttgggaaagaatattgttgctcttatccctttcaccttgcggtatcggaaacagataatctctgtcgtccctaaaattggcacctttcgatgtattatatttggttgcataagcacgcataacggttccgaaacgtttttgtctcatcagatcatcccgtctccatccttccatcgctaattcacaacggcgttccttccagatgatttctttcagacgctcttggtcggtttctgttatgtcgggcagtgtattagttgttgtagcagggatatacgcctgttgatctcttctcggatctatcggattagtttttcgggctctttctcttacatcattcaggtaaggaagtgcaagccccggttttccgttttcgtttaatacttcggcatacatcaagagaacatcggaataacggatcaaacgaatgttgtaactaatcatccagacgtcgaaaccagttttttctactgctggcacagtcatcttgtaatcatgataaccgcttggagattcagcgttgtcttgcgcttcagtatcacctttatatctgtcaccagtttgtgtgaatacataagtaatacgcgggtcatctgcatcaaaggcatcatagaggtcttgggtcggtacatgaaatccatatccctgataaccggagatgcgtctgcttgtgaagaagtggggaacattggtacctgtggcaatgtttttatcatatactttgttggcaatctcaaatactgattccgaactgttttcatattcagtgcgccagttcatgccgtaatcactcaacaatgtatagtctttgtccacttcaataatatcatgaagtaccgtttcggcagaggtaaaatcacctttgaacatgtatgttttagcaagcattgttttagcaaagccacgtgttgcacgataagcatcatcttcagagtaatctccttttgcaggaagtgcggaggcatcggttaaatcattcacaatacattcatataccttctccaatggggagcggggtatttgcagtatttcagcgggttgcatcggcgtagtgattagaggcacttctccgaatgtagtgaccagacaatagtacccgaatgctctcaatgctttagcctcgtttgcataacgtttcaatagttcttcgtttcctattgcatcaggagcataataaatcacatcgttacagcgattgattaatctgtacagaatctcccaacgacgtcctatttcaccattggttgtgtagatcgtaaagtcggacaagtcgcgtacttcggcacggtcaccgtcatttcctcctccttttagagcatcatcagtgctgcaatcacctacaaaataatgatttaatgcatattcattccaagttgtacgtaattgaagataagctccagtcaaggcttgttcaatatcgctttccttctgataataattatcgcttgtggttttaccataacttggttcgtcgagagagcagctatacaaccccactccggcaagagcccagcatattataaataatatttttctcataatgtaatgtctttttagctagatttaaaattgcaaattaactccaaaagtgaatgtacgtgaagacggataacgtgtagtatccactcccatatccaatgggttattgatacccagttccggatcaagtccggaataaccggttaaagtaaatatattctgaccgctcacatagaatctacaacttgaaaacagtttgctcttctggcaaatgtgactcggcagtgtataacctatttgcatattctgcaaacgcaggtaagaaccgttctccacatagaaagaagaacctctcatattattgttagagtcagagttggttatgcgtggatatacagcatccaaatccccgtcttttgtccatgcttttgtgtaagcatccgccaacgcattctggcgtcctgctgaagcaaggcttcctttagcaacgttccagatgtcatttccaatagttccctggaatgccatacttacgtcaaagttcttataactaaatcctaagttgaaaccataaatgaggtccggattaggatcaccgataaaagtacggtcatcatcatcgttcaattcgcctgattctcctaatttggcaaacttaaaatcacccggttgtgcattaggctgaatcttggtaccattcttatccacataattgtctatctcttcctgattctggaatattcctatttgtttgtacccccagaaacgtccgataggacctcctacatacgtacggctagtatttccactcaaatattccgatgtaagtttggttacctctgtcttataagtagacatgttcagccctacattgtaattaaagtcttttcctatctggttacggtagttgactactatttcaaaaccggtattcttcaagtctcccgcattaaagaaggggctgttagggaaggcgccaaaagaaggaataggcatattgagcaacatgtcacttgttttctttacataaaagtccatgctaacatcaaggctgtttttaaagaaagacatatctaaaccgacattggtttgttggctggtttcccatttaatatctgcatttcccacataagtcggaacgtaaccttgtgagtacccgtttccaaagtaccattgattttcattattggtaccaatcaacgtaagaggtgcgtctctgtcgattcgttggttaccattctgtccccaacctacacgcagttttaaattggaaattgtattttcaatgttcaggtttttgaagaattcttcattgctcactctccaacctaatgagactgatgggaaatagccccaacggttacgtttggcaaatcttgaagaaccgtcggcacggaaattgaccgtagcaaggtatctatcatcatatacatagttgatacgtcccaggtacgacaacatagaagatgtttctttacctcccgaggtgttatctccagctgtttgtgcatcaagtatctgatagatttcatcgttacctaaagcctttctcttaaatgcattaatgccttcgctgctgttcttctcataagtcatggcaaccattgcatccagtttatgtctgcctattatcgtgttgtaattaaggcgttgttccacctgataattagaagtaacagcgctattattattcaattgagtttctttattatatttactttcctgattcgctaagttatcttccgaaaaagtagacgaatagacaggacggaagtctttgaaagtatcatggtatctttcgaaactatactgtacccgatagctcaatcctttatacaatttgatttgggcaaacacattaccaaatacattgaatatgtcattgtatctattaggaagttcgagcatggctaccggattagggtcgtaagaccattcggtaggcgcatatttgttatattcgtaattttcagaagacggatctaccaacgggctgataacaggggtaaaaggatcagctttttgaatgaaatcgaatgaaggaattgctcctgcgtcacgttttcttatctttgccagattgacattggcgccaacagtgataaatttgttgatatcatattcaagattcgctttaagtgaaagtctcttgaattcagtagtgatgattgcaccctgatcgtctacatatcctaaacttaaagaagatctcgaattatctgtccccttacggatgcttagattatagttctggttgaaagctgtacgggttacttcattccaccagttggtattataacctttctgatactgattggtaaacttatccttcattgagttttgaaagcttgcatcgttttcatacgctttcatgatgaagttgtagtattggtcgctgttcatcatgttcaatgctttataactgttttttacacctacataagcatccaatgttacagtcgtttcacctttcacccctcccttggtagtaatgaggattactccattagaacctctcgaaccatagatagcgcaggctgaagcatcttttaatacttccatacgttcaatatcagatggattcaggctgctgatgttatccatgaactgtccatcaaccacgtacaatggattgttgtcattgacggtccctaaacctctcacgcggatcactgcatccgatcccggctggccggaactggcggcaacaaatacgccggctgccttacctgttagtagttcggatgcattggacactgcatagttcttaatatccttactacttatagaagccaaagcaccggtaaggtcactctttctttgagtaccgtaaccaataactacaacctcatccaatttattatcggacactagatttacattgtacgttccgctatttgttacgtttacaatttcagttttaaaacctacatacgagaatgaaactttatttgacgatacttttaatgtatatctaccgtcaaaatcagtgatagtaccattggtcgttcctacttcaagaacagaaactccaattaaagcctctccggtattactgtcgtataccacacccgaaatactcttggtttgctgtgcaaagacatttgtgcaaacagcaagaataagaatgaataataataaatgcttactcatagtttatacacttagatttaattatatgaaatgatattttgtttattcgcaataatcttaccatttttcagttctaattctgttccggcgggaagttccacaattactcttgcgtcgttggccgggatctcaacggagccatttgtctttatattttttgctatatattctttggcaacaatatcaaacaaatcgcatggttgggtagcttgataagtaatggttttggtctctttatgagggttataatagagatagaccggataaggtttctctgtatagaagtctgtgacattgcaatccagtcggagaataccctccacattcgtttgacaaacaatggcccccaaaataccaacaggagaagagctgtaaacactgaacatgctttccgtcggattaccttttatccatttgggaccatcgccgattgcaaccggactaactccttttaatgatgcttttccatagtcatccgtttttcgtaaaccttcataagaaacattatcataagtaatgtccttcaattccggagcccattgatgtgtttcatctatttcccccggatagaacaaacgacatgcacttgcattgttcaacatccacttgccgatagcttttgcatattgaggctgatatttcaccatcggaatgaaaggccaggcaggtttgatactgttcatgaggaatgcatatcctccgccgtctgtgatacttccttgcagaccacttacatcataatcaccccattttcctacaataattccccaaccggttcttcctgcagggcttttacatccgtcaaatacccaatcaagaagtttggctacatcatagttggctccctctactgcattcaaataggctgccgtataaactccgagtggtaaaagagcctcgtaaaaacgactttctttttgggcaagcagggcttcgatagcactcttactatgttgcagataacgtggatcgccaaacttatgataagcacacaacaatacataagcatgaccaccggcagcgtcttgttgcaatggaatattattcaccattcctttcatttgtgcatagtcaaaataagaatagtcgtaatttccattcaatacggaatctgctttaacaaactgctccgcaatacttttttgtatcttctctgccccgtctacattggggaaaacatcgcatatcgcataatataaggcattgggtaatacatcataccaccagtcacgaccatagcctcctcctaaaagggctactgacggagtcgtattgttcatgactatattccagccgttatcagaattgaaataattctgcaccatttttacatagttatatccgtcttgattcgtcttgtcaatccctacaaggccggcaccaagaatagctgccaatgaattcagactttcatggaactctccattattggcattctttccctgacgaatatctttaatggcagtatataagccaaatgtagtctggtccatatttctgcgggtgtcatctaaccagattaatggtccgacttcgcttttattattccagtcaaagataaactggtcatacttttgggctttttgcttccagtccagcattttataagtttcaggcatatcaggcatagagtctaccctatggatggaaacctgttttaccttttcaccaaagttatttccgttgcccgagcaagatgccaggaaacaaacggtcataagtacaaaaacacctttacttgtcattttcatgttcaatagtatcagtttgattagtaatattcttagctaaaggatatgccgctaattgtaatccggcaacaatcaccagcgcatatttcaatgcaaaatcctgcgatacacaataagcaaggaagataaacagtagtaaaccgaaagctcttccaaggaaaaggccgaactcatgacttaggatatatgcatattcgtttctattctcaatctttgcaactgcatcaattgttctcatcataatggggaagtaagccaggtcgaacaaaggctggaatatcactttgcaaaggacgaaaaggatcactcccgtagcagagaagagaataccgttgaatagtgtaccggcaaagaatacgattagtcctcctacaaatattttcaaacggtcttgcgggcgggccatacgtcctaatacatacaccaggacagcggtcaatgctccgctaactccctgaatcaatcctaacgctccttcatctcctaccagcttcaatactaatatagccggtgccgttactaaaaaaccttgaaccattcctttcaatgcggctagccacagcatctttttccaaagtatgttgaagcggaaatagaggaagttcgtttctttagggttctcgaatttacctttccacagtgtcatgcaggcgataacggtaatgactactgctgccatcgtaactacacagtaagaggtattgatattgaagaggaatccgaaaacttcttttccatctatctggctgataaatgcgcctataattaaaggaacaccgatggaagtaatagaaaagaagaaagactctagtccgaagaaatagttacggctgttgtcgttggtattatagagagccagcaggtatcggttggtccaaaagaaaccagaagctgctcccattaaaaagccggccagaccaagttcgatgaagccaagtgacttgatggtcatcataccgaacatggaaatgccacttaccaggattcctaccgaataaagtgtcttcacactgtatttctttagcagatagccgttaacaagagaggtagtaatgatgcctatatacattgccagctgataaaaagcaaccatcagggggtcactcgtgtttctcatgatataggctcccacaaagatttctactatcggtagtaccaatgcataaagcatattggtaaccaacagtgttctcatgttaggttcctgttgcttaaagaacagatattcttttttcagtttattcattacttctcttgtgtctgttttaatacgtttaatatctctgaaatggaaagctctgccttacaaatcacttcatcgcttgctccataatacatggttatcgtatcgccgtccaccaaatgcccattagtgaaaactacatttccgaagaaacctgtttgctcataagcggcgataggttccatgataggttcttcgcttcttgcaatgactttcgacgggtcatttaaatcgagtaataaagcccccaagcaataacggtgattaaaatcggctccatgataaatctccagccagccttcttctgtctttattggagctgcccctgcccctacacgtgcgcaatcccacattccgtcacgagtggttgccacacatttgtggtttccccaatgcaagcggtcgggcgattctgccaaccatatataattgccgccaagttcgggactgctcgggcgatgaagagcgaaatacttgtcgcctatcttctgttcgaataatgcacaatctttattatgcggtgggaatatcattccatgccgtgtatagtttttccaatcattggtgtgaatcagtccaacccctacagctaccgacgatacttctgtgaaagtaaggtaaaaaccatcttcggttgttgcaacacggcaatcctcaataccgaatgcttccagctctccttttccgaaaataggtggaaattccggttcatctttgaagtgaataccgtcggtacttgaaaccaatcgtaagtaagacatcgtggtcagataattctttcctttgtaaccgataacgcgtgggtctgaagcatccaaatcgggatcattctttagaaacgaaaccacttctatttttcctttttcattatatataggaaaactgataattccttctttctgtataggtctttctgcgacgcgcaaaagtaaccaaattttgccttgatatttgaaaactccgggatttaacaaacatgtaatttccattccgttgattcccgcttttaaatcttttggagccagtagggggttctgctcacatcttttagctatatccataatatttcgattagtgattatttctgtgaacaaaagtatgagatgagagacaggaaagcgtttactatattctcaaagaagtgtacacatgctcaagaacatgtttttaagaggatgatattggggaatgattttagaagaggcagggatattcgtatttatatgctgtactatttaaaagcttgatttatagatggatgtgcacttcgttgaagtgtattatattctcataagtgtatagtatagtttctttgaggagtgcaaaagaaacatataaagataaaaaaataagaggccaaactcaaaaatataatttgaggaagcctcttgttttttctttttaataaaaatgatactgtaaatcctatttcttcacgtatggataatctatcgtatataatctgtcagagtttgtttgatagaggtgaagccgttaaaaaaaaattgttagacagcctcttttcgttatcggtttggtatactgtctttataaatagtaattgtcctttttcttgttgaatcattcttgatactggttacatctccccgggtcgtgaaatacacatagtttcccagatcgagaaaacggtatactttcactccgtcgtgctcgaacagataactgacttcataagtctggttattttctgattttccgcttttcagtggaatacctgcatagcaggaagctagtcccgttatgcagaagaaaagaataaaggtccgaatcaatgttttcataatcatttcttcacgtgtggataatctatcgtataatgtaatccgcggctttccttacgctccattgcttggcgcataatcagataacccacattcaccatattacgcaattcgcagatttctctggacgctacgctacgtttgaacaggctttcagtctcttcgtagataatatcgagtctgtcccaggcacgtttcagacggaggtcactgcggacgatgcctacgtatgtactcataatttgattcacttccttcatactttgcgtaatgagcaccatttcttccggagagcgggttccttcgtcattccattcgggaatatcttcattataagaatactgatcaaccgcttgcagactgtgcttggcggcagcgtcggcatataccactgcttctatcaatgagttggaagccagacggtttccaccatgcaatccggtgcacgaacattctcccacggcataaaggcgttcgatggaagattgtccgtccaggtcgacaagaatacctccgcagagatagtgggcggccggggctaccgggatataatctttagtgatgtcgatgcccaggctaagacatttctcgtagatattggggaagtgtttctttgtttcttcgggatctttgtgggtgacgtccagatatacatggtcgtctccacggtttttcatctcgttgtcgatggcgcgtgccacgatgtcacggggagcgagcgaaagacggggatcatatttctgcatgaactcttttccgtccatggtgcgcagtacgcctccgtaaccacgcattgcttccgttatcaggaaagaagggcggtctcccggatgatacagggcggtagggtggaattgtacaaactccatatccttcaccgtacctttggcacggtaaaccatggcgataccgtctccggtagcgactagcgggttagtggttgttttataaacggctcctactccaccggtagccattagcgtcactttagcaagataggtatctacttttcccgttttcggatcgaggatataagcaccataacatttgatgtccggtgtctggcgggttacagtcactcccaggtgatgctgtgtcaggatttcaatggcaaactggttttcgatgaccgtgatattcggatggcgttgtacggctttaatcaggctgtcttgaatttctgctcctgtattgtctttatggtgaagaatacggaactccgagtgtccgccttcgcggtgcaagtcaaattcgcctttctcgtttttgtcaaaatccactccccacttaatcagttcttcaatttgtgcgggagcttcgcgcactaccttttctactgcggcacggttactgatccagtcgccggcaatcattgtgtcttcaatgtgcttgtcgaaattatccaccagaaggttggtgacggaggctacacctccctgggcgaagtacgtattggcttcttccagcccacttttacagataagagcaactttacctttgtgcgccactttcagcgcaaaactcataccggcaattccggaaccgataacgaggaaatcgaattttcttaccataatcttgttatttctcaccgcaaagctacaaaataagttacttcgttgtacttttcgttgtcactaattcataaaattgctaccttgcaggcaaaaatctgacaaaatgaatcgaatatttcatgcgcgcatcgcctggtaccaatatttcctgttggtggtgcttactgtgaatgccgtcggcgcattgtggtgtaagtatatcttggtggcagtactgtttatgttgatgctgattgtagtgatcgaacaaattatacacactacttatacattgacaacaaatggtgatctggaagtctcacgtggtcgttttattcgcaagaagatcatcccgctttccgaaattactgcagtcaggaaataccattccatgaaattcggccgtttctcggtgacggattatatcctgatagaatacggaaaaggaaagtttgtttcggtgatgcctgtcaaggaacaggaatttgcagaactactcgaaaagagaatgtttgaaaagaagataaaagagtaactgattatatactatgaaatatcaagtgattatcatcggtggtggtcctgcgggatatacggctgccgaagctgccggtaaaggtggtttgagcgtattgcttatcgaaaagaatagtctgggtggcgtctgtctgaacgaaggctgtattcctacgaaaacattgttgtattcggcaaagacttatgacagtgcaaaacatgcatcaaagtatgcagtcaatatcccggaagtctctttcgatttgcctaagataatagcgcgtaaaagtaaggtagtgcgtaaactggtgctgggagtgaaagcgaagctgactgccaacaatgttacaattgtatcaggagaagcgcagatcattgataaaaatacggttcgctgcggggaagagacttacgaaggagagaatctgatattatgtacgggttcggaaacctttattcctcctattccgggagtggacgcggtgaactactggacgcacagggatgctttggacagtaaagaattgccggcttctttggctattgttggtggcggggtaatcggtatggagtttgcgtcgttcttcaatagtttgggagtacaggtgacggtggttgagatgatggacgaaatcctgggtggaatggataaggagctttccgctttgctccgtgcggaatatgcaaaacgaggtattaaattcctgcttagtacgaaagtggtcggcttgtcgcaaacggaagaaggggctgttgtttcttatgagaacgcggagggaaacggcagtgtcattgcagagaagctgttgatgagtgtcggccgtcgcccggtgacgaaaggtttcgggctcgaaaacctgaatttggagcagacggagcgtggtgctatcagagttaatgaaaagatgcagacttctgtgccggacgtgtatgtttgtggtgacctgacaggattctctttgctcgcccatacggctgttcgtgaagcggaagttgccgtacattccatcttgggaaaggaagatgccatgagttatcgggctattccgggcgtagtctataccaatccggagattgctggagtgggtgaaacggaggagtcggcctcaacgaaaggaatcaattatcaggttatcaaacttccgatggcttactccggccgttttgtggcggagaatgagggcgtcaacggagtctgcaaagtattgttggatgaacagcaacgggtgattggagcccatgtgttgggcaatccggcttcggagattatcactcttgcgggcactgccattgaactcggattgacggcagcgcaatggaaaaagattgttttcccgcatcctacggtaggagagattttccgggaagtgttataaacggattctgatatctgcgatcgttcattgatgcgggtatcttactgataaaatcaaatatatgatgagaaaatatataatcactccggccttattggcaatagtttgtatggtgatgtgtcattgtacatttgttgatgtcataaactgtattgtatgaaaaaaagtcttttgttggtcaccctttcagtttgtttgttgccactttggggacaacaaaatttctcccggatagattcgcttatcaagaagatgctccccgaagcatccgaggtcggcatatccgtctacgatctgacggctaagaaatcactttataactatcgtgcggagaaactttcccgtcctgcctctaccatgaagctgctgacggctattaccgcactctcccgccccgaagctgccgaacctttccgcacggaagtatggcacgatggcgtgatagaacatgatactttgcaaggcaacctgtatgtggtaggcggattcgatcctgaatttaacagccagtcgatggattcattgatagaagaggtaatcactttccctttttcggtgattaacggacaggtgtacggcgatgtttcgatgaaagactctctttattggggtagtggatgggcatgggacgatacccctgcgggctatcagccctatttgtctccactgatgttttgcaaggggactgtacaggtttctgtcgttccttctacggtgcagggagataccgcgagtgtttcctgccaacctgtatcctcctattatacagtgacgaatcagacgaaaacacgtacctcttctgccggaagattctctttcacgagagactggctgacgaatggcaataatctcctcgtttcgggcaatgtcacttcgatcagaaaggacgatgtaaacatctacgactctccccgtttttttatgcatactttcctggagcgtcttcgtgggaaaggaatcacgactccccagtcgtatggttttgccgaattgcctcgcgatagtgtgactgtagaacggatggcttgctggaatacttccgtgcagaaagtgctgaaccagttgatgaaagagagtgataatctcaatgcggaagcatttctttgtcgcttgggggcgcaggctacgggaaagaagcaggtagctgccgaagatggtattgtcgagattatgaaattgatccgtcgcctagggcatgacccgaaagactataagattgccgacggttgcggactgtccaattataattacctctctcctgccctgctggtggactttctgaaatatgcgtactcgcaaacagaggtgtttcagatgttatataaatctcttcccgttggcggggtggacggaacattgaaattccggatgaaaggtactcctgccttccggaatgttcatgccaaaacaggttcgtttacggcaataaatgcgctcgcgggctatctgaagatgaagaacggacatgaagtggcatttgccattatgaaccagaatgtactttcggcggctaaagcgagagcatttcaggataaggtgtgtgaggtgattattgggaaataggctgatatgaatacattagcccgtacaaccaaagtggaattccgttgttgaatccgatttctatgttgtcaaggggcaggtactattttccatggagggctctttattgattcttctataaaaagacaattgtattctctaataagcaaaaatcgtaggattttgtttaccagagaatacaattatacttgttttgaatcgaatactgtaaattctatactatatatattatatttactttgagtattcagcccaattagtattcttcatatcgccactcttagccaactctgcgtgcataccaagtgcagcctgaatagcgtgtggagtctgtgcccggttaccggccagtttgaggtaatcccaaagaagctctttgtagtcaggatgtgcacagttttcgatgatggcttgtgcgcgttctttcgggctcttgccacgaagatcggcaacaccttgctcggtgataacgatgttgacatcgtgctccgtgtggtcgtggtgggataccatcggtacgatcgcgctgatcttcccttctttggccacagacggacaagtgaagatagagatgtaagcgttgcgggtaaagtctcccgaaccaccgataccgttcatcatttttgttccgccgatatgggtagagtttacgttgccgtacaggtcaacttcgatggctgtattgatagaaatgataccgaggcggcgtactatttccgggctgtttgagatttccgacggacggagaaccagtttgtcgcggaagaaatccatatcgttgtagatgccttccagacagtcatttgtaacagtcagtgaacaggcgctaccgaatttgatgcgtccttcgcgaatcaatccgatcacggaattctggattacctctgtgtacatttcgaatgcaggaatcgttttatcacgtcccaatgcaccgagtacggcgttggcgatgtttcctacacccgattgcaaaggcaagaaactggacgggataataccgcgtttcatgtcggctgcaaggaagtcggcaacattctggccgattttgtcggtcaacggatcagcggcagcgaaagaacgcgcttcgtccggccagttggtttccactacgcctataatctttttcgggtctacctgaacgtaaggcagtccgatacggtcactcggtttatagatcggtatttcgcggcggtaaggcgggtcgagcggttcgtatacgtcgtgcatacccataccggatttgctgtgtgcgctgttcaactccacgatgatctggtcggcaagacggcagatggtcggggcgatgccgccggcggcagtcagataaatttttccgtccggagttacttcgcaggcttcgatgatggctacgttcactttgcccatgaacccgtagcgcacttcctgtgccatttgtgagaggtgtatgtcgttgtaggcaatctctccgttgttcacagctttgcggaagtcggcgttggtagtataaggagcgcggtagcggatggctttggcacgtgacagtacgccgtcacaggattcccctgtcgatgcgcctgtgaaaattcctacttgaaacgggtttcctttcgcatgttctgcttcagcaatttttgcgagttcggctgttacagccttggccgttccggcgggagtaaatccgcttaggccgatgttgtagccatgtttgattaggcttgcagcttccgctgccgaaatacgattgagtgacataaatagtaaatttcgtgttaaatacagttgatatttttattgataattaattctctgtttgtacggccttgtaccaatgcttggcaatgactcgtcacataatgattcgaaactcaatgagtttacgggctctctcaatacttccgttgaagtatctctccccagataatagcgcggcgggcttcttctgcggagtgaatcgtgaaatcatgttcgttatcagttgattcggtatgagagttataatgagaaccttgttgggaatttcgtttatcttgcgcggcactgtttgccagggatgcggaaacggatatttcttctttttttcttttctgctgcgccgctggtttcgccgtctgtttgggagactgttgcggtggcgtctgtttcaggggtttaggctggaataattcttccagcgacttggggccaccccatgcctcgggcataggaactgcatccggagctacttcaacgggggatggcatcggggaaacggggcgtttattcttagcttttttcgatttactattcttattcacctctttgaatattcccacaagaatgacacctgctatcaagagaaatttcaaaaaatcttccattgtgtttcactgctaattagttatctgccaaagttacgtattttatctggttcaggctaacattttattatgaaaaaagggcagcttcacagctccccttaatttttttaacctaaaccttaactatgaaaaaatctaatgtttctttcattgcacaaatgtgaaaaataaatttaaatatgccaagcatatcgcctaaaaatgtttattctcttaacataaattacaaatttgcttgccaaatcataagtttttgcgttattttgatatcaattcactacttattgaaagcgaagccgtatctttgcatccgaatttttaaactaagatttgagtatgaacgaattaacgggagcggactttaaatccgcaactgaaatgaaggatgacaacaaaaagttgtttatcgaaacctatggctgccagatgaacgtagccgacagtgaggtgattgcctcggtgatgcaaatggcgggttattccgtagccgaaacgctggaggaagccgatgccgtgtttatgaatacctgttccatccgcgacaatgcggagcagaagattctgaatcgcctggagtttttccactcgctgaagaaaaagaaaaagcatctgattgtaggtgtactgggctgtatggccgaacgggtaaaggatgatctgataacgaatcatcatgtagacctcgttgtggggccggatgcttacctgacgttgcccgacctgattgcggccgtagaaaccggtgaaaaagcaatcaatgtggaactatctactaccgagacttatcgggatgtgattccgtcgcgtatctgcggcaatcatatttcgggttttgtatccatcatgcgtggctgcaataacttctgcacctattgtatcgtgccctatactcgtggacgcgagcgcagccgtgacgtagaaagcatcctgaatgaagtagcagacctcgtggcgaaaggctataaggaagtcaccctgttggggcagaacgtcaactcttaccgttttgaaagaccgacaggcgaagtggttactttcccgatgttgctccgaacagtggccgaggctgctccgggagtgcgtattcgtttcacgacttcccatccgaaggatatgagtgatgaaacgctggaagtgattgcgcaagttccgaatgtgtgtaaacatatccatctgcctgtgcagagcggcagttcgcgtattctgaaactgatgaaccgtaagtatacccgtgagtggtatctggaccgggtggcagctatcaaacgtatcatccccgattgcggactgactaccgatattttctccggttttcattctgaaacggaagaggatcatgccttgtcactttcgctgatggaagaatgtggatatgatgctgctttcatgtttaaatactccgaacgtccgggaacgtatgcgtccaagcatctcgaagataatgtgcccgaagaggtgaaagtgcgtcgcctgaacgagattatcgctttgcagaaccgtctgtctgccgaatccaaccagcgttgcatcggtaaaacctatgaagtgcttgtggaaggagtctccaagcgttcgcgcgaccagctgttcggtcgtacggagcagaaccgtgtggtggtgttcgacagaggtgcgcaccgtgtcggtgatttcgtcaatgtgcgtgtcacggaggccagctcggctacgctgaagggggaagaaatctgatttcaccacagaggacacggaggtcttttttcttccttgaaactctgtgtcttctgcattctttgtggtaaaacttacatcatcatatgtctcctgatggagaacttcacaatcgccatcgcattgatggacgcgaatggaatatccatcggctcatgatgagtattatagctcacgagcttgagatacccttctttttccgaacgattcacgtacttcaccgccagatactcgtctccgtcaatcataaacgacaccaggtatatttccccgtaaatcacgttgtcgaaactgctaatttccttgtatccgataatatctcccgatttcagtatgggatacatgctgtctccgttgacgtagaccgccccgtcgcagacggaaatattgggaatccatatcttccccagtgcatattgctgtttgttggtgaataatgttttcaggttcgccgccgccgtaatatcgtataatgtcacgctacggtcgtctattggttcgggcgttttcggattgtgtataatttcgacttctccctgtaccagctcgctttggcaaaatctcggctgatgtttcggatttccttttcccaataatagccagttatagtccaccttgtctccgaatttgtcaagcagcagacggaaatcaatactgtttcgtgctccccaattggtaactgttgctctcgaaacttccaggtattcagctagttcgctgtctctctttaagttcaatacctgtttggcacgcttgatgatacctaatacatccaaatttgtatccattctgtttttttatttaaaagactaatctcggatttacaaatggcagctataaaaatggctgcctcaaaaatatgtttactatatgtttataatcaatgatttgtgaaatagttgaggtttaatattgaaaattgatattttatttatgaaaaatattctatctttgtcccattgattaatagaaaacgtttcaaaaatataaattaaaaacggatatgccatgcaatacttcaagaaaaacacaaaaaacttgaaattttctcatccgccacctgcggaaagcttactgatgcctgttaacagctattctctcaagtattaatagctatttctctaaccattaatatctgaaacgccagatgttaatacctggcaataggataacaaaaggataacatattgtatacgaatactccgtatttgaatgattacagacctgactgataaaaactagcatttataatttataattggataacaaaatgaaaagctcaaaagtacaaacactgtgcgtttgcggatgttgcaaacgctctcttccggcaagtgccttttatatcaataagaaaaccggccttcccggcaactactgtaaggaatgtcgtaaaactgtcagccggaaccatcggaagaacgagaaacgctcccttgcatgcgacagggaaagcaattatccggtaataacctctacggaaaatcccacgttgcgacgggaacttattctgcatgcccttgaaaccgtagctgccagcattgaacggaaaaggcggaaagtccgtgaatcggaatttgaatccgaatcaggttctgaattccaatccgaatcagtctttgaattggaattagaatcaaaatcaggatcaaaattagaattggcagactgatttataaaaacaatttatatcatgggacgaataaaacaagggcttgactatttccctttgaataccgattttatgcacgaccgtgtcgtacgccgtgtgatgaagcgtgaaggcgattccgccttcacgatcctgctctataccctgtcttatctatattcgggcgagggttattatattcatgtcgatgatgacttctatgacgaactctccgaccagctcttcagcacggataacgatagtgtccgccgggtgcttcgtctgtttgtggagtacggtttcttcgattcctctctctacgaacgttacggcatcctgacttccgccgacattcagcggcagttcctttttatcactaaacgccgcagccgccgtcatatttctccggactactgtctgctgccggatgaggaaaccgtacactccacccttccagatgctgttgcagaaaccccggatattgtaacgcaaaccctcgatactgtaacagaatccccggatactgcaacaaaaagcaccttcataaaaagaaaagaaaaagaaaggaaagaaaacatcctccctaaccctcctttgcccaaaggaggggatgagggagaagaaggaggagatttttctaacagaaaaccggcgaagaagaaacatgaactgacacagtcggatattgaccggatgcaagctcctgctgacggacacccgcgcaacctttccggactattggataaccttcgcctttatcatattcctccctctgaacagtatgcaatcgtactgaaaagtaattacggagaaatcggtggtaaggtttggaagggtttcggtgtcattcgggcaagtgccggaaagatcaaactgcccggtcattatttgttgagtgtcctgaataactgaattaataagggttatgatgctgctgcgttgtgtaatatgttgtaaattagtgatataacaacaacttcttatattaacgaatttattaacgcacacttttaaaatctcttgcacagacagaaataaggtcttatatttgcattgtcgataagcttaaagacacagacaaactagaattattaacgactaaaaactattacaattatgccagtattgtacaaacctttccagtcaactctggaagacaaaaaaagcggtaaaaaactcttctatccccgagttgtacgttcgggaaacgtggattccgcacaactttcgaaagaaatagcagcctactcttccctctctccgggtgacgtaaaaaacacactcgacaacctggtgacggtgatggggcaacacttgcaatcttcggaaagcgtaagcgtggacggtcttggtaccttccgtatggtgatggtagctcgtggcaaaggtgtggaaacctctgacgaagtgtcggctgcacaggctacgcttaccgtccgcttccaaccgacaacgactaagaatcatgaccgcactaccgctacccgttcgatggtgaccggtacgaagtgtgcccgttatgataaacttgtttccgatgcaggtagtgcaggaggcggcaactccggtggaagcgacaagcccggtggaggcggtaatgaaggaggcggagaagcgcccgatccggctgcataaatgacgtcacggcagtgaggagtacacaaaatgtaaacggcaaacttcgtaggcttaactagacatttgacttttaactaaactagaaatcattcactaacatgaggattatcaacttgattgtggtgcattgcagcgccacgagggaggattgtacactttctccggaagatttggaccggttgcaccggcggcgcggatttaacggaacaggctatcactactacatccgcaaggatggaacagtgcacctcacccgccccatcgaacgcatcggagcacacgccaaaggtttcaacgctcattcaataggtatctgctatgaaggtggtctggactgccggggatgcccggcagatacccggactccggcacaacgggctacgctccggcgactcgtcgggcagctacaggagaaatttcccggctgccgggtatgcggacaccgggacctttcgccggatctcaatggaaacggtgagatagaaccggaagaatggattaaacagtgcccgtgctttgaggtggcaaaggaactcaatgagttcggagcatttgccgatagaactgatgagactggaagtacggagaaacacagagtaacacaacacattaaagaacagaaaggaggtaaatgatggcaatgaagaaatcagtatgggatatgatcctgaaagtggttatcgcagtggcttcggctttggcaggcgttttaggcgctaatgcgatgaatttgtaaagcagaaaattaagtagtagtccttccatagatcatgattgtgtgaaatggaaggactctgctaattcattttgtattgactaaactattttattgataaataatagaaaaaacgagttatgaataatctatatacgaataaaaaaataatactaaagaggctgtttcttatattatcagcctttttcgcggttttatctgctaaggggcagagtgaagatggaataaagctggatgttccacgacttgtaccactttccccaacggctacggctatggtgaaatatcagtcttatcctgtagatcattgtacaggagtacctaacataactattcccttgtatgatatagttgcaggggaggttaccatacctgttactttgtcttatcatgcttcggggcttaagcccaaagaaggaagcggatatgcgggagcaggatggacattgaatctcgaaccgtctatagcccgccaggtgatcggggtagcagacaatgactattatggatggtttgatcgatatttttctcaaaatacagtccccggtgatgaaagagaccgattgatttattatggggagatggtagataataaacgggatacgcgtccggataagttcacttataagttgccgggtggcggtggaagcggatatttttcagacaggtcttcccctcttattactgtgcctcataacagcgatgtggtaaggtatgttgaaagtgatatgaatataacagatggaaatggagtcaaatatctgttcaatggcgtacacgagacgatgaatgatattattacccgctggatgtgtacctctatttgttcagcccgttatccacatcctacattggttagttttcagtatcaaacccttcagaatcaatgggaacctagtgcttattataatttgaatgacaggctggtctttgatgaaagggataaagacgggagtcccaaattgtatctgatggaacaaaaaagcggtggcaataactattatcaaattacggcaggcagatcgtcaggttcttcctccttgcccaatgccaataaagagagcgtttcgagctatgtagcgaatatgagttacccgtcaggtagttactgtgcggagggtaggatgagtactacccgattggcacaggtgaattttatgggaaacagattgtctgtcagttataaagcagtaggtgaagtgcctaacaatacaagtgtattagataaaatgcaagtgacggatgagaatggagaactggtgcgtaccattaacttttatgtaactccctataatggaaaaacctctttgactaaacttgattctgtacgtatctccgctcccggtgtagaatcgcaaacttattcattcaggtatgtgggtgtaaacagcgttccttccatctatacgaaggctgtagatcattggggatttatgaacggttcggaagcgagtgctaatggtagtaagttgacagtgccgaacttttcgaaaagaatacctttaccggataccaataacacgggaagaaaagacactgtattatttgagaatgcagtcggaatagaccgtgaagcgtctggtaacattgtgggtattcttgaccggataacagatccgcaaggtattgaaacctctttctcttacgaaggcaattacggcgcgtttcgtgacaatagccaacagccggagtatcgagactacctctatccggttggcggattgcgggtgaagagtatagaaacctatgatccgaagacaaggaaaaggctctgtaagaattatagatatggcctgacggttatcaataatgagaagtatgaatccgtttggggcggcggtgctattaaacacatagttacagagcgtgattattgttctacggtaacgcaagtaatggacgacgggcaaagcctttggaacgaatatttgacagtctatcattcgatgcctgtctctaatattacctttcgtaacggaagtccggtaatgtacaatattgtcagtgaagagatattgggaggaggcatttcacaaaagaccgtctattactatgatgtggatgcacatgcttttgaggacgttctgcattgggaaagtggggagaatacattcgcttctgtccgggagtttatgttgaatcaaccggaaagcgtattgaatcgacttgggcggatgcttcccggacatccttatgaaccttctgatgattttgttacaggctattttgagaccaatcagagaaatggggctcttatgggtatagaccgtttcgacgggcaagagctagtgtcatctacccgatacgaatataaaaaagtaatcgcgggcccgtataatattcctgtggatcttcctgtccggaagctgatagtggatgttgatttgtacatgaaaaaaccgaatagcctgcttggcaagccggtatttgtggctgacaatgacaatacccattctgctacgaatatgaggactacttattatttggattgtgaaacgtattgggcacttgataaagaaacgacacaatattattgcaaagtgaacgggagacaacgggtaatgtcgacggaaaagcaatatgcgtatgacgaccgccatctctccaatccaggttcttcgttgaagccacgtagggtggactttacaaacagtgacggcgtacaattctcggatcattatacttatctggatggttatcctgccatactctctttgcataaacacgtcgaagacgagcaatgcacggaaaagaggatcttgtttaagtccggcacctgcctcccggtgagggtgcaatttaaaactgaccgaatggcggactttcgtgatgaagtcgtttaccaatcgtatgacagtaatagtaatgtatgcgaaattatggcaaaagacgatacgcctgttctcttcatttggggatatcgcaaccgctatcctatagccaagatagagaatgctacccggcagcaggtgagtgtggcgcttggttatgatggagacatcgaagacgttttcggtgattgggcctcacttgccgtacctactgaagagatatgggataagataaactctcttcgtgagagacttcccggtaatacgcgggttaccacctatgaatatgtccctttgcagggagttgtttccattaccgatcccaataatgtcataacgaaatttgaatatgataattatagtcggctgacagatagttattatctggatgcggacgcccgtaaggtaatgcttcaacagtatatttatcattttggtaaatgataagtaattcaatgaatggtttaacttgataatgaaattgattttttatgaaaacttatatatgtttatttttcttgttattctgctctgtctattcgtggggacagtctttggaagaacgaatggcaacagctattgacattggtacctattcggaaccgtttacttatgaagatacccaaagtacagctaattttaactgtggatttatacctccgaccgatatggatgatacgagggtgtttatatccaaggatattttttacaaactaacagtgacgcagcctatgaagattagagccagtgcaaaacccagtatcactgatagtggtactgttttcttgctcaattcttcgggcatcctcttgagtcgtacgatttatgtggaggaagcatggggagattatggatatggtttgctgcctggcgtgtactatctggttgctaaacctaacatctatgaagggtataaaccggtggatgcggaagatgttactatttatgtaaagacaacccctcgtgaattgggtgaagatttttacaatccgtttgagttggggacatttggtgagaattttgcattggctgattctgcaaatacgatagattatcaatgtgattataatgccagtgataactattgggataattattctcggcatgatgtagtttatcgcttcaccctgacagaaccgatggagatttgcctggatgatgatggaactgaatgtccttgggaaggggattcttacagtgttcaccttctttcagctttgcatgatcctgttgttcccatccgcacgcaaaagcttggtacagactacgagctgaatgtgtatgatttgggagcgggcacctattatatttatgtttatgctgacacgcctatttgggccgtgtattatagaatgaacttgagtgggcgtacgtatgctcccggagtcagtttttctcgtcctattgatataggtagccgggcggacagctttcaatatacagatgttcagaactcggaactcatgtccggcaattttccggagaaagccggcaatgaagttttctatcggttggagattgaaaatccgatggaactgaccgttgataattgcggttcggaagttgcggacacctatttgaaagtgttttcccaaacgcagaagttgctgtatttcaatgacgattcggatggtgacggagcttgtgcaaatgccaaaagtgcccgtattcatatacccgtgttgctcccgggcgtctactatattgtgaccgacgcggaaaagaacggcaacatttccctgtccataaacgggcgacttcttgcacaaacgggagacacaaaagcacttgctatcgacgctggaacatataaggcgggactcttcttttccgatccccgagatacctctgtagactatacggatgcttatccggcaagacctgcgaatgacgttttttataagttggtattgcaaaaggagatggatgtggtgtttagtcactgcggttcggaactggaagatacttatatgagcatcttgaatggagccggtgagctcctttacagcaatgacgattatgcgggagaaggtcagtgtgagaatgagaaacatgcccgcattgaggtcaagaaacttccttcaggcacctattatgttgtttcggaaggcagtgtcgataacggacggatcacgacgacgatagaggcaccgaactttagtgatgctttgtgtacaaccgaggggcagccctgtgtgattactctgactcccactgtctccacagatgatctctcccaattgcacacctgtgattatcttcgcgagatacagtattttgaccatttcgggaatccttcacttcatatatctcatggcttcactccttataaaaccgacctgctcacattgcaggagtatgacggaatcaaccgcgaatctaaactttggcttccggtagcagaatcgactgctggcggtgcttttcttccatccgtagaagtcagtgaggccgtttgtaaagcaagctattacgagaaagatagctctcccttcagctctcctgaatacgatagttcttcattgaaccgaattgtcaagaagtatggtcccggagttgcttggcagaatcatccggtcaaaacagacgtgttgaccaatatagaacgtaaaaacgcagttgatcgggtagacagttgctttatcgtgtgccgttataggataaagaatgacagtttggtctgtgcgggtgaatatgatgccggaacattggaagtggttcgtacgatagacgaagacaatcatgtgagttatgaatttaaagacaaggccggtcgcatagttctcgttcgtcagtctgatgataatcaaatatcttatgatacgtaccatgtttatgataactatggcaacctgtgtatgatgttgcctccgatggcagccgattattttttcgatgaaggagaatggtctgaaacggctcccgttcttcagcaatatgcctatatttatcattacgataagtataaccgctgtatttacaagaaacttccaggatgcgatcctgtttataccgtttatgacgctgccgatcatcctgtctttactcaagacggcgaacagcgtgagcggaacgagtggagtttcagtattcctgatgctttcggtcggacagtattgaccggagtttgtacgaatacgttggattatgtttctaattctttagatactatcgtcgtgtatgccgattgggcaaaagaagagaacgggttgaaaggctatcaattgaaaggtgtaaccttagagtctccgtgtctcctttctgccaactattacgaccactatgagtttttgggcaagaacggcatccctaatgatatgaccactgtttacgtagaggaaacaggctatggcaagcggaatgcaggtggttgtaaaggacagctgaccgggatttggacatcgctcctctctgcccgtccgggtacttttacgtattcggtaatgtattatgacgaccgttaccggataatccagcaaaggggtaataatgagttgggtggtacggagattgtccatacagcttataatttctcgggaaatcccttggaagaaaaacgtatacatacagttcctggcactgaaccaaccgtagaattgcaccggcatacgtatgaccatgccaaccgtctattgaagactagctatcagctgaatgataatactcctattgttttagtagacaatgtgtatgatgagataggtcgtttgaaaacagataaacgtaatggtgtatatgagttacgaactgactatacatataatcttcgttcgtggataaaaggcattaatggtccattgtttaaccagacgcttaactaccaggaaacactagagggaactactccctgttataatggtaatatcagtcgcatgtgttggcgtagtgtcaaaaatggtatggctacagttattgatccgcaagaaaagggttacagtttcacttatgatggcctttcccgtttgaaagatgctatttatggagaaggtactaacttaaaacaaaaccggaaccgcttcaatgagcaaataaccggctatgacaaaatgggtaatatcttggggctgcttagatacggtcaaacgggtacggattcttatggtttggttgataatctgaatttgatctaccatggcaatcaattacagtcggtttatgacaatgccaccaactctgtatttggtaacggtatggagtttaaggataatgtcaatgaaacggtagagtatgaatatgataaaaatggcaatctggctaaagatttgaacaaaaaaatatctgaaattcaatataatatcttaaatttgcctagtcacattagctttgctgatggaagcagtattgaatatgaatatgctgcagacggcaggaaagtccgtaccacgcatactataaacaataacgtcacgtccaccgtttattgtggtaatgcgatctatgagaatggcagtttgaagatgctcttgaatgaggcgggatattatagtttccaagataataagtttcatttctgtctgaaagatcatcaaggtaatgtaagggttgttactgacgaggccggtaatgttgatgaagtgaatgattattatccttttggtggtttaatgtctaatggatgtaataacgttcagccatataagtataatggtaaagagttggatcagaaaggtggattggattggtatgattatggggcaagaatgtatgatgcaacattgggaagatttatgaagactgatagatttttagaaaagtatgtttctctatctccttatcaatatggagcaaataatccagtgaataatatagatataaacggagatagtatttggtatactttaaatgacaatattgtgactatgcatgtaactgccaaaatattcaataattcaagtgataatataaatatgaagagagctgccaaagatatagtttctgatataaaaagtacttatgaaggagaatttgaatggagtgatggcaaaacttataatttaaaggttgatatggatctcaaagtggtaacttctatgaaggatgttgaaagtgcagaccatttatttgtattggcggatagtgatggtgaaggggctcgtggagttacaagtatgtctggtggaaaagtaatgactttggcgtcaagggattttgcgaataataatttattgtctaataatctgtctcacaataacacctttactgcaactcatgaatttggacatgcagccggattgctacattcaaagaatccatttaatataatgaaacaaggaggtgtttttcacaatagtaattcgacacaaagaaaagttatgctgcaacaacaatataatataaatagaggtagtaattccttgaattatatgaatagaaaaataccttatccatatgttcactatgataataatattgttgatgtctatagtttaggtcttaaatggagatgatataaatgaatttgaaaaatagaaaagtattaatggtaacagtcgggctgatgttattatgtgtatgtattgtttgttttgcatctagatctacattgatctttgtagggaactcgtatgaaaatagccaagatattaatactattatttcattgaatgataaaataatatatagtggttttataaaggcttatgaacttccaagattgttagaaaaaagaaatatgaaaattggcttttataaagtttctgcaaagctaaataatgtattgatagaacagcgatttttttattttttacaaaaaactatttggatagattttgattgtgcaaacagtaactctttattaatttcgaaatattacaggcaaattccattgtaatttagcactatctcctacccagcgcagaaatgcagtttatctaaaagataatggactaaagaaagatagaaaaggaatgttgtacgaatatactaaaaatcaaagtcgggtaaaatctattcgaatattgggtaatacagatttagtacgatatgtaaaatattaataatatacttatgaaaaacttggtttatgttatcttatttattttattgggaggatgtgtttccccctctttttcgccagtggagatacatcaacgagtggcagaacaagttaaagtattgatagatagtggatatctacaaactccatatattgaaataaatgaagtattatcaaatgattccagcattatttatagtattaaaggggcggattctccaggttcggatggtgcagagttaccttctaaagtgatgacctataaagggaaatatctttgttttatagaattagatgagcaggaaatgtcgcgaactgaattgtttgaaaaaggaattgtggcagattctaattttcatgagaatctccatttggacgatgggtgggtattggctcttcgaaaatatgaaaatgggtcaactttggtaaaaaaggtattatcatcggcttttctttttgaatatccgcaactttggtagacctttcaatcagattattagaataagtggtcgaaatatacagtatacagcttttaaactttctgatggaacatttaatataggaagaatacatgaaattttatagaataccgactaagcaagaggaacaacttattgaattacttgttcataagtcatctttagaaatgtctgaagattggaagaatggcttattagtatgtccaatggatgatggggaaatgggtagtttgtatttgtttccacaggggaaaataaatgaaagtaggaaattgggtagacaaattagtgaatttcaatttacagatattgatggagttgaggttattgcatccttaaatgtggatgttgatggagttctatttgaacttgatatatggaaaactaattttgaaaaatttgtaaaactccctgatttatagctcgattactaccttgacatgttatagaaatattcttaagtgtcagggtagttttttatattattgttcgataaaacagagtgtcttaccctgatatggaattagaaaatattctgtgtcagggtatctttttataaatgcggaaatgaaaggttgctttctcaatataatagattaaatttgcctagcaacatgtctacgcatacagaatatgtacttgatatttcagctagcctaattgtagatactgatgtcttaattggtttatctattaaaagtccttaacgaaaccccaatccatcactttttatttgtttctttgcaccaaattcgggtatagtgttgtcttgtcattcgaggcagcacttaattttgcttagatagttaatggagaaactcagtataaatgcttgtccggtgtgtggcggtgcgcacttgaaacgcgtcatgacttgtacggatttttatgcttcgggcgaacagtttgaactgtattcgtgtgaggactgtggatttacattcacacaaggagtccccgtggaagcagagataggcaagtattatgagactcccgactatatctctcacactgatacgcgcaaaggcgcgatgaataatatctaccattatgtacgttcctatatgctgggccgcaaagcgcgcctggtagctaaggaagcgcatcgtaaaacagggcgtttgctcgatataggtacgggaaccggttacttttctgatgcgatggttcgccggggatggaaagtggaggcggtggagaaaagtccgcaggcacgtgagtttgcgaagttgcatttcgatctggacgtaaagcccgaatcggctttgaaagagtttgctcccggcagctttgatgttatcactctttggcatgtgatggaacatttggaacaccttgatgaggtgtggcagcgacttcatgagttgctgacagaaaaaggagtattgattgtagctgtacccaactgctcttcttatgatgctcaacgttatggcgagtattgggcggcatacgacgttccccgtcatctctggcattttactccgggcactatacaacaattggcttcccgtcatggctttattatggcggcgcgtcatccgatgccgttcgatgcgttctacgtatccatgttgagcgaaaaacatcgtggcagttcatgcagtttcctgaaagggatgtttgccgggacgttggcctggttcaatgctttgggaaggaaagaacgcagcagttcaatgatttatgtattccgaaaaaagagataacgcatgggaaatcaaaacaaatataagtcaggttcgattttcgacatgcagttcatcacgtcgagtatcagtacgacattagtgttgctgttgctgggactggttgtcttcttcgtattgacagcacacaatctttccgtatatgtccgcgagaatatcagtttctccgttcttatcagtgacgacatgaaagaagcggatatactgaaacttcagaagaagctgaatcaggaacctttcgtgaaacaatccgaatatatctctaaaaaacaagcactgaaagaacagacggaagcaatgggaaccgatccggaagaattcttgggctataacccttttaccgcttccattgaaatcaaactccattccgactatgcaaactccgacagcattgcgaagatagagaaaatgattaaaaagaacatcaacatacaagatgtgctctatcgaaaggagttaattgacgccgtgaatgataacatacgaaatatcagtctggtactgcttgccttggcggtagtgcttacttttatctcttttgccctgataaacaataccataagactggctatttactccaaacgcttcctcattcacaccatgaagttggtaggagcgagttggggattcatccgggggccattccttcgaaagaatgtatggagcgggatattggcagccatcgttgccgattccatattgatggggaccgcttattgggccgtgacgtacgaacaggaattgcttcaggtcatcacgcctgaagtcatgttgatagtctgtgcaagcgtattggcgtttggaattgtaataacgtggctatgcgcctatttctccatgaataaatacttgagaatgaaagcaaacagcctgtactatatttagcggatggcgaatgactgacggcaaacctgtgtttgcgtgtgattagcatccgtaacaaccgactgatagagtaagggaatgattgaatttagtaatttgtaattaaataaactatgtctgacaagcagaaatttgcctttgataaagtgaactttatcttgctcgcaatagggatggcgattgttattatcggctttctattgatgacgggacctacatcgtccgaaacgctttttgaacccgatattttcagtgtacgcagaatcaaggtagcgccggtcgtttgcctgtttggctttatatctatgatttatgcagtattgcgcaaacctaaaacacaaaaaacagaagaataaagatgggggatttaacaacatttgagacgattattattgctattgtagaagggttgacagagtttctaccggtttcttctacaggacacatgattattacacaaaacatattaggagtagaaagtacagaatttgtaaaagcatttactgtaattattcagtttggcgcaattctttcagttgtctgcctttactggaaacgctttttccggttgaaccatacaccggctcctgcaggcgcttccgctttgaagtgttttctgcataaattcgatttttactggaaactgctggtggcttttattcctgctgcaattttgggtttcctgtttagcgataagatagacgagatgctggaaagtgtagcgatagtggcagtgatgctggtaatcggtggtatatttatgctgttctgcgataagattttctcgaaaggaagcgaagataccgtactgacagaaaaaaaggcattcaatatcggtttgtttcagtgtattgctatgataccgggggtatcccgttcgatggctaccattgtcggaggtatggcccagaagttgactcgtaaggatgctgccgaattttcattctttcttgccgtgccaactatgtttgcggcaaccggttacaaggtgttgaaactcttcctggatggtggaaccgagattcttgtcaacaacatgccggcacttattatcggtaatgtggtggcttttgtcgttgctttgctggctatcaagttctttattagctttgttacgaaatatggctttaaagcatttggatggtatagaattattgttggcggaaccattctggtaatgctgctgcttggatacaacttagaaattggctgatgaattttaaaaagggagaagtactgtttttcaataaacctttcggatggacttcatttaaagtagtagggcatgcccgctatcatatttgccgccggataggagtgaaaaaactaaaagtcggccatgcgggaacgctggatcctcttgcaacaggggtgatgattttatgcacaggcaaggcgacaaaacgaatagaagagtttcaatatcatacgaaggagtacgtcgcgacgttgcgtttgggtgccactactccgtcatacgatttggaacatgaaatagatgccacctatcctaccgaacatatcacgagggaattggtggaagaagtgctgacgcactttatcggtgccatcgatcaggtacctcctgccttctctgcctgtatggtagacggtaagcgtgcttacgaactggcccggaaaggagaggaagtcgaactaaaagcaaaacagcttgttatcgacgagattgaattgctggaatgtcgcctggatgatccggaaccgatgattcaaatccgtgtcgtatgcagcaaagggacctatatccgcgccttggcccgcgacatcggcgaagcactccatagcggagctcacctgacaggattgatccgtacccgtgtaggtgatgtccggttggaagactgtctgaaccccgaacactttaaagagtggatcgacgggcaggaaatagaaaatgaggaagaaaataattaacgtaataaggaatagatatgaaattatcacaattcaaatttaagttacccgaggataagatcgctctacatcctatgaaatatagagatgagtcgcgtttgatggtattgcatcgtaatacaggtaagattgagcacaagatgttcaaagatgtattgaactactttgatgataaggatgtgtttatattcaacgatacgaaggtgtttcctgcccgtttgtatggtaacaaggaaaagacaggtgctcgtatcgaagtattcttgttgcgtgagttgaatgaagagcttcgtttgtgggacgtattggttgatccggcacgtaagatccgtatcggtaacaaactgtatttcgggccggacgattcaatggtggctgaagtgattgataacaccacttctcgcggacgtacgctccgttttctttacgacggacctcatgacgagttcaaaaaggcactgtattctctgggtgaaactccactcccccactctattatcaaccgtcccgtagaaccggaagatgctgaacgcttccagtctatttttgcaaagaacgagggtgcggtgactgctccgactgctagtttgcacttcagtcgtgagttgatgaaacgtctggaaatcaaaggtgtggactttgcatatatcactttgcacgctggtctgggtaacttccgcgacatcgacgtagaggacttgacgaagcataagatggattcggaacaaatgtttgtaaacgaaatggcggtgaaaaccgtgaatcgtgccaaagataacggtagaaatgtatgtgcggtaggtacgacagtgatgcgtgctattgaaagcgcagtcagcactgacggacatctcaaggaatttgaaggatggacgaacaagtttatcttccctccgtatgaatttaccgtagccaattcaatgatttccaatttccacatgccactttctaccttgctgatgattgtagctgcttttggtggttatgaccaggtgatggatgcttatcatgtagcattgaaagaaggttatcgtttcggcacgtatggagatgcaatgctgattttggacaaataatggcaaaagtttatctgggactcggcactaatcttggggataaagaacaaaatcttcgggatgccgtgcaaaaaatagaagagcaggtagggaaaattgtttccctgtctgctttttacgttactgctccttggggattttcttccgataacagtttcctgaatgcggcggcttgtgtggagacaaaattatctccattggaggtattgcaagagacgcaaatgattgaaaaagaattggggcgtacccaaaagtccgttaacagaatgtatagcgaccgcctgattgatattgacctgttactttatgaggatttagtgctttctgtgatttctgcttccggagtagagttaaccctcccccatccgttgatgacagaacgcgacttcgttatgaaaccactagcggaaattgctcccggattagttcatccggtactcggaaaaacgatgaaagagcttacttcttctttttctccgcaataaacaccggcaaataggcgatacatcctattagtactgcatacagcaaatggatctcctgaaacggcttgtcaatgaaatggcagacaatggcgtaaatagcaatcgtgaatccgacatagagcgccaagaccaaaagcgtttttaatttcttatttagaatcattataaatctatttatgtgttaaatacgtggcaaagatactcattatctccaaaatctctttatctttgcaaccgaaatgaaagtgtggacagatttgagtagcttgcaaccacggaaaaaaatgctaaaacacgtctgattgacgcctttcggtttatcctttgcagcactcgcctctcctactctctctcattttttaattttcaatttttaattcttaatttaaaaagatgggatacttatttacatccgaatcggtgtcagaaggacaccccgacaaggtagccgatcaaatatcggatgctgtgcttgacaaactgttggcttacgaccccagttcgaaagtagcttgcgaaacactagtgactaccggacaagtggtgctagcgggtgaagtgaaaacaaaagcgtacgttgatctccaactcatcgcacgtgaagtgattaagaaaatcggttataccaaaggagagtacatgttcgaaagtaactcttgtggtgtgctttctgctattcatgagcaaagccccgatatcaaccgtggtgtagagcgtcaggacccgatggaacagggcgcaggcgaccagggtatgatgtttggttatgctaccaatgaaacggaaaattacatgccgctttctcttgatctggcacaccgcattctgcaagtgctggcggacattcgtcgtgaaggaaaggtgatgacttatctccgccccgatgccaaaagccaggttactatcgaatatgatgacaacggagctcctgttcgcatcgatacaatcgttgtttctacgcaacatgatgactttatccaaccggaagatgattctcaagctgcccagctgaaagctgacgaagaaatgctgtctatcatccgccgtgatgtgattgaaattctgatgcctcgtgtcattgcttctatccatcacgataaagtgttggcactgtttaatgataaaatcatttatcatgtgaatcctacgggcaagttcgtaattggtggtcctcacggagataccggtttgacaggtcgtaagattatcgttgatacttatggtggtaaaggtgctcacggtggtggtgctttctccggaaaagatcctagcaaggtagaccgtagtgcagcttatgcagcacgccatatcgcaaagaatatggttgcggcaggtgtagcagatgaaatgcttgtacaggtgagctatgctatcggtgtggctcgtccgatcaatatttttgtagatacttacggccgttctcacgtcaacatgactgatggcgagattgcgcgtgttatcgaccaattgttcgatcttcgtccgaaagctatcgaggaacgtctgaaacttcgtaatcctatttatcaggaaacagccgcttacggtcacatgggacgtgaaccgcaagtgataacgaagaaattcttctctcgttacgaaggagacaaaactgtggaagtggaactctttacatgggagaaactcgactacgtagataaaattaaagctgcttttggtctgtaaaacagtctgaaacagggcttaacttgttaagaaagagctgcaatttcaacttcctttaatggaaattgaagttgtagctcttgatttttaataagttatatttaaataaatgttttttggctactaagtatgttttatcggaaattgctacttttgtatcgtaaaataaaacagactgctaaatgaaaacaagatgttgttgttctaaacgctatttattggtgttctctattttacttgtcagcgtaggtagcatttttatgtctgtctctctttcttcctgttcctctccttcagtgaagaatcaattgttattatgcgctgattcattaatggagacatatccagatagtgctttgtctattttggaatcaattacttatccacagaagatgccacgtgctgaccgggcgctttatgcgctactgctcacacaggcacggcataaaaactatattgctttagaggatgattcgttgataaaaacggctgttgactattatggcgataagaagaaaagtctgcgtgctgcaaaggctcattattactggggagctatttatagcgagaaaggatatgcctcatttgccgtcgaagaatatctgacggcaattcgattgatgcctgttaggaatgaattcttagcaatgatttatgataatcttgcagaatgttatgaagaggatcgtttgtacaatgtagcaatagaaaactatcgtgcggcttatcagatattgaaaggcaaagatgaacagacatatccgatgagagggattgcgcgtgtgtttttattgcaaaatgaaaaggatagtgcattatattattatcaacaagctcttgattgtgcattggcagatcaagattctagtttgataggagctctttatcacgatttagctatggtttatagtgagaaaaaggattatattcaagcagataaatttgtgtcgaaagcaattctattacaggggcaggatgctattaatacttgtttgtcaaaggctcaaattatgttgaatctgaataaactagattctgccagttatttttttagtaagaacatggatgagcttgatatttatggaaaggccgtttgttatgatggtatgtatcagatagcgaagagaaagggagagtggaaaactgcaacagagaatatggatgcttataagatactttatgattctatgcagattatgactgataatgaggagctaaaccgccttatggataaacatcaactggaagagcataaaagattattgtcagagcatactagaacgctaatttttagtttgattactgcattttcttctttaatgattatatgtgttttctgttttatgtggaacgacagaaaaaggaaaaagcattatatagctctacagcatgaattgacccaaaaacgagtggatactatgctgttaaaagaagaagagctttctgaatctaataaggaacatatagataagaaaagatcggaattgaccgaacaacagattcaattatgtatatcagtacttaaaacaactgattgctacgatcaattggaagcgttggagagagcaactcctaaacagttattggtgatgcgtagcttgaggaaggaaatacgttctgatatttctaatgcatttgttgatgtgatgatgaacttaaaagaacgttatcctgctttaactggtgatgatgtgtttttttgtgttctttcattactttgttgctcaaaaactgttgtaatggagttaatggatgccacatcagatgctcttaaaacacgtaaaaatcgcataaagaataaaatggatgcacaaatttttgagcgtgtgtttggtgttgataatcagtgagatgtgatacgaactttttgcttgttttattttttaatgaatgtctgttaccattgttaccacataataatcgtttcttttgcttcatctgtgtatttttgaagcgaaattttaaacccatttattatgaaagctaaattcttaccttttttattgttggctgttttacttcaagtgagtacgttttcctttgcagatgaaatgatatctgcgcgtgaaatcagattgaaaaataaaactaaggtacaacatcggtctattcctgttactcctgaagcttttattgaaaactcattattgtctattgatcttctttctactgttcctgttgtgactgttattataaaagatgcagaaacagaagaagttgtttatacttctactgatttaaatgtaaataaggtttatgtcgatcttgctggtgaggaaaaaggtaaatatatcttggaaatacagctttcggaggaggcctttaccggagattttgaattagaataaatctttgaaatatatattatttgcaactaacataatgatgatatacctaaatcattaactgatgaagccccgctgttgaaatatatggcgcattgctgaaatggcgattagatgaccgaaaggggaaggtaaattctatccgtgggcttaataaaccttgtgaaaggcgcataaaggtatattgaaacgtagaattaaaatcacttttttaaattgtatgctgaatactactggtagggtgttcgaatgattttatgattcgaataataaagttcattcagcaacaatttgatacacctgttagtagatgagatatctgtgatagatgtattctttgtgagaaaggttcttggacttctggataaggagtccaagatttttttatagggatagataaatgtagagataaaaatgatctctgattaagttgaatgtgaataacggaattttttcgtaattttgccttctcgatataataatggatagtgatgaagatgaatcagataaattccgtatgtgtatatagtgcttccagtaccaagatagacgctgtttacttccaagcagccgatactctcggctatctgcttgccgaacaccgtattcgtttgataaatggagccggaagtattggcctgatgcgttctgtggcagatgctgtattgaaaaatggtggtgaggtgacaggtgtgattcctcgttttatggtggagcaaaactggcatcatacgggattgacagaactgattgaagtagaatccatgcacgaacgcaagcggaagatggcagatttgagcgatggtattattgctttgcccggtggatgcggtacccttgaagaactgctggagattattacctggaaacaattgggattatatctcaatccgattgtaatcctcaatataaacggattcttcgatccactcctcgaaatgcttgaaaaagctattgatgagaactttatgcgccggcagcatggcgatatatggaaagtggcgcagacgccggaagaagcggttcaattgctttatgaaactcctgtatgggacatttccattcgtaaatttgcagcgatatgataggcgacacactaagttcccgaagtgcggatacgctgtcccttcttcggcagaaccagactagtccggcaaaggcggacactgatagtctgcagttggttgatcttcatgctgtgcaagaagttgattccggctttgaggggacacctatctcctactctccccgcacggacgatgccattgcgttgaccttgctggcttgcttctttctttcctccatagccttggcgcgcggaaagaaatttctctcccaacaggtgaaagactttgtattgcaccgtgaacgaacgagtatttttgatagttctacggcagccgatgtgcgttatctccttgtgcttgtgttgcagacttgtgtcttgtcgggtatcacatttctcaattattttcatgatacatgccctgctttgatgaaccaggtatcccccctccttttgctgggtatctacgttggattctgccttgcttatttcttactaaaatggctgatttacatgtttcttgggtggacgttttttgataaaaataagacaaatatatggctggaatcctattctgcgctcatatattatgtcggatttgccctctttccattcgttctttttctagtttattttgatttaagtctcacaaatttggtcataattggggctattattttaattttcactaaaatattgatgttttataagtggataaagcttttttttcatcaatttagcgggcttttcctattaattttgtacttttgcgctcttgaaatagtaccttgtttgctactctatcaaggtatgattcaaatgaacaatattttgctaataaaattttaggacgttgaaaattaaaaaagtactagtgtcgcagcctaagcctgcgtcagagaaatctccctattacgacatagctgaaaagtatggcgttaaaatagatttccgaccatttattaaggttgaaagtctttcggcgaaagaatttcggcaacagaaaatttcgattctcgaccacactgccgtaatattcacttcgcgccatgctattgaccattttttcactttgtgtactgaattgcgcgtgacaattcccgaaacgatgaagtatttctgcgtgacggaagctgttgcgttgtatattcagaaatatgtgcaataccgcaagcgtaagatcttcttcggagctaccggaaagattgaggacctgataccttccattgtgaagcataaaacggagaaatatctcgttccgatgtcagacgtacacaatgacgatgtgaaaaacttgctcgacaagaataacattcagcatacagaagctgtgatgtaccgtacagtgagcaacgactttacaccggacgaggagtttgattatgacatgttagtgttcttcagccctgccggagtgacttcattgaagaagaacttccctgattttaatcagagagagattaagatcggcactttcggctctactaccgcacaggctgtacgtgacgcaggtctccgtctggaccttgaagctcctacggtgcaggctccgtcaatgactgccgcacttgatatgtttatcagagaaaacaataaataaacagagtgggtatatatactttgtgtaaagccgaaaggctgaatagtaaaattttgatcggaaagatgtttgaaggcggcgtttcgaagtcgttttccatctttccgatacgcgttgtatatatgcctgttgagcagggcgaggctcctgcttctatattaatcagtgtatcgaaacgtcgttttaaacgagcggtgaaacgcaaccgtgtgaaacgtcagatacgcgaagcctaccggaagaacaaatctctcctggtggacgaattgcaacgccgggagcagcggttagccgttgcctttatctatctgtcggacgagcttattgcaacttccgaattggaagaaaagatgaaaatagcgcttgcgcgcatctctgaaaaattatcctcatgaaacctcgtaactcccggatatctgccctgtgggtattcttaacgggaattttgaggaaagtattctctttcttgttgcttgttcccatctacttttaccgggtttgtatttcgcctcttactcctccctcttgtcgattcacgccaacttgttcggcttatgctgtcgaagcaattaagaaacacggtcctgtaaaggggctttacctcgctgtgcggcgtattctgcgatgccatccctggggtggttccggctatgatcccgtaccttgaaacaattaaaatgagaaatagaagatgaaaaagaatgtgactgacattttggatattcatactcataaactggaggccgattctctgggaaaatctatcgtgaattatccgctgttggcggactctccatcgtatatgcctttcgcaggagatgtggaagtggataggggatattattattctgtcggcattcatccctgggagttgacagagcataatgccggacagcttttggattatcttaagcagcagttgcggaaaaagcagtttgtcgccgcaggagaagcgggattggataaattggcagcagcttcaatggaacttcagttaacggtgtttaaagcgcaggtgaggctgtcggaagagtatggtttgccgttgattatccactgcgtgaaagcaatggacgagctgttagcagtgaaaaaagaatttcgtccccaacaagcttggatatggcatggttttcgtggaaaaccggagcaggcggtgcagttgctaaaaaagggcttttatctctcttttggagaacattatcctgatgaaacgatgcagacagtacccgacgaacggttgtttctggaaacggacaacagttcgcttgatattgaagatatcctgtgtcgggcagccaaagtgcgtggggtagaagtggaagtgttgcgtgagacgatccgccgaaatatccaaaatgtcttttttagggcataagagttgtatcttccgagaaagagtcgtacttttgtcgcacatgggattgaaatacaataaaaaacaactaattaatagagtaatacgatgaattttgtagaagaattgagatggcgtggcatgttgcaggacatcatgccgggaacagaagagttgttaagcaaagagcaggtgactgcctatttgggtatcgacccgactgctgattcgctacacattggtcacctttgtggagtgatgatccttcgtcatttccaacgctgcggtcataagccgttggcactgatcggtggcgctacaggtatgattggagacccttccggaaaatcagcagaacgtaacctgctgaacgaggaaacattgcgtcacaatcaggcgtgtatcaagaaacagcttgccaagttcctcgacttcgagtcggatgtgcctaaccgtgccgaactggtgaacaattatgactggatgaaagatttcactttcctcgattttgctcgcgaagtaggtaagcacattactgtgaattatatgatggcaaaagactctgtaaaacgccgtctgaatggtgaagcgcgtgatggattgtcatttaccgagttcacttatcagttgcttcaaggatatgacttccttcatttgtatgaaacaaagggctgtaagcttcagatgggtggttctgaccaatggggaaacattactaccggtgccgaattgatccgccgtaccaatgggggagaggtgttcgcactgacttgcccgctgattacaaaagctgacggcggtaagtttggtaaaacagaatccggaaatatctggctggaccctcgctatacttcaccttacaagttctatcaattctggctgaatgtaagcgactccgatgccgagcgttatatcaaaatcttcacttctatcgaaaaagaagaaattgaagcactgattgccgaacatcaggctgctccgcacttgcgtctccttcagaaacgtctggctaaagaagtaactgtgatggttcactcggaagaagattataacgcagcggttgacgcatccaatattttgtttggtaatgctacttccgacgctttgcgcaaattggacgaggatacattgctggctgtatttgaaggagtaccccaatttgagatttcccgtgatgcgttggcagaaggagtgaaggcagtagatttgttcgtcgataatgcggctgtatttgcttcgaaaggtgagatgcgtaagttggttcaaggcggtggcgtttcgttgaacaaagagaaactaacagcctttgatcaggtaatcacaactgctgacttgctcgatgaaaaatatctgcttgttcagcgcggtaaaaagaactattttttgctgattgcaaagtaataatgcacgattcactcgatagaatgtaaaaaagtgaacgaaatatttggaggtttgcttgcaaacctctatctttgcaccgctttttaacagaaagcacataagtttggactatggtgtaatggtagcacaacaggttttggttctgtttgtccaagttcgaatcttggtagtccaacgaagaaaagccccgaaagagacatctttcggggcttttctttcgtgactctgaagtcgtcgtttttgtatatccttataaaattgaagtatataggggatcagcgtatatagaattcattaatcttattttattcgttatattgactattttaatgcttatcgtgttggtcgttgaatagcttgtattttattatagaaggttcaaactgtattaggtagaaatctctcccaaatcgtattatagttcgttaaaaaagtgtacattgcacagattctggacatttttggtggataattggaacaaaattgcaaggtaaacccgttttcttttgctatttttgcatcgtgtacgtaaacgaagtgcacgtagaaagagaacttattcaataactataaataaataaggtatgaaaacgaactatgaaattcgctatgctgcgcatcctgaagatgcaaaaagttatgatactacaagaatccgcagagatttcttaattgaaaagatatttgtccccaatgaagtaaatatggtatattccatgtacgaccgtatggtggtaggtggtgcgctgccggtaggagaggtgctgacgcttgaagcaatcgatccgctgaaagctccgttcttcctcacccgtcgcgagatgggtatttacaatgtcggcggtcccggtattgtgaaagcgggcgacgcaaccttcgaactggattataaagaagctctttatctgggttcgggcgaccgtgaagtgactttcgaaagcaaggacgctgctcatcctgccaaattctacttcaactcactgactgcacatcgcaattatcccgaccgtaaggtgacgaaagccgatgccgtagtagctgaaatgggttctttggaaggctccaaccaccgtaatatcaataagatgctggtgaatcaggtgttgcccacctgccagttgcagatgggtatgacggaactggctccgggaagtgtatggaacacgatgccggcccacgtacacagccgtcgtatggaagcctacttctatttcgagattcccgaagatcatgctatctgccactttatgggtgaggtaggcgaaacacgtcacgtatggatgaaaggcgatcaggctgttctttcgcccgaatggtctattcactcggctgctgctacccacaactatacctttatctggggaatgggtggtgagaacctcgactatggcgatcaggacttctcgttgattacagatttgaaataacaaatccaatagttttcctaatttaataataaaaagaattatgaatcagtatttgaatttttctttggaaggtaaagtagcgctcgttacaggtgcttcttatggtatcggttttgctattgcttctgcattcgcagaacaaggcgctaaagtttgttttaacgacatcaatcaagagttggtagacaaaggaatggctgcatacgctgcaaaaggtatcaaagctcacggttatgtatgcgacgtgacagacgaaccggctgttcaggctatggttgctacgattgccaaagaagtaggtacaattgatatccttgtaaataatgcaggtattatccgtcgtgttcctatgcacgagatggatgctgctgatttccgtcgtgtaatcgacatcgacttgaatgctccgttcatcgttgctaaggctgttcttcctgctatgatggaaaaacgtgctggtaagatcatcaacatctgctctatgatgtccgaactgggtcgtgaaactgtatctgcttacgctgctgctaagggtggtctgaagatgctgactcgcaatatctgctctgaatatggtgaatacaacattcagtgtaacggtatcggcccgggttacatcgctactccgcaaactgctcctcttcgtgagaaacaagcagacggaagccgtcacccattcgattcattcatctgcgccaagactcctgccggtcgttggttggatccagaagaactgacaggtcctgctgtattccttgcttctgaagcttctaacgctgtcaacggccacgttctttatgtagatggtggtatccttgcttatatcggaaaacagccgaaataatgtaagatagaagagattccgataaggtgatagaatggcaaagagcatcctcttttcatctgtcaccttattttttatcattccctttgcaggagctataggaccgacttattggacatatatgcccaacgtgttgaacatatatatccaacacgttggatatatatagctgatgcgttggatctatagatccaacagatgcggatataatagcctctatttgcaaagtatatattattcattcaatgtagactaattatgaaaaagatattaattctgtttgctgtagtcttgatagggtttgcttcttgtgccgacagtaaacagtcaatgacaatcacagtgaccaatccgctggctcttgaacgggtgggggagatggttgaagtgccgatgagcgatgttgttgccaagttgaaactggcagatacagcgcagattgtagtgcttgatgttgacggtcagcaagtgccttatcaggtgacgtatgacgaaaaggttgttttccccgctacggtagaagcgaacggaacggctgtttacactattcaaccgggtacaccggcacctttcgatgtcgttgcttgcggtaagtactaccccgaacgtctggacgacgttgcctgggagaatgatcttggcggattccgtgcgtatggccctgctttgcaagcccgcggagagcgtggtttcggctacgaccttttcacgaagtacaacacaacggagccgattctggaatctctctatgcggaagaactgaatcctgaaaagcgtgccaagatagctgaattgaaaaaaacagaccctaaagctgcctccgaactacaaaaagctatctcttaccatatcgatcatggatatggcatggattgctatgccgtaggacctacgttgggtgccggtgttgctgctctgatggcgggtgacactattatctatccttactgctatcgtacacaggaaatccttgataatggcccgctgcgtttcacggtgaagctggaatttaatccgctggtagtccgtggagactctaatgtagtggagacacgtgtaatctcactggatgcaggttcttatctcaacaaaacgattgtttcatataccaatctgaaagaagcaatgccggtgactaccggactggttctgcgtgaaccggacggtgcgactgtggcagatgctgccaatggctatatcacttacgtggatcctacaacagatcgtagcggtgcaaacggcaagatatttgtcggtgctgcatttcctgcacaggtaaaagaagcgaaagtggttcttttttctgaaaaggaaaagaaagaacgtggcggggccgacggtcatgttttagctatcagcgaatatgagccgggttctgaatatacttattattggggttctgcctgggataaggctgctatcaagactccggatgcttggaataaatatatggctgaatatgcgcagaagttgcgcacaccgctggcagtagcatattgatgtgttgaattgcttttccaatagattaagcaaaggtttcttttcaccaaagaaacctttgcttaattttatcttcctgaaaaagaaagaaagtttttatgttataacgcctttgaattatctcgtaaaagcgtgttgttcgtaatattcgtatgttgttccgtcttctttctctttttcacgaagttcatagactaattcattttctgtcattgtggtcactgtccacacttctgtgtaattatcctcttcagtgtcgatgagagtcagcttattaccggagtagctccatgtaccatgataataattagtacttccggaggagttgtagacatctttttctacatacgtaccgtcttccttgaactctatggaataacggttggttccatttacaaaatcttctttagagtcacttaccttttcaccatcttcccattcttgtgaaagataatacactccattccatgttcctaacaataaatcgcgtgaaccgacagcgtcgtcatcgtcgtcgccacaggaataaatgctgaacgacagtaatactgcaactatgcaaacagttgctttccagattgttttcataataaattgttttaattgtttgattttgagatgattcgttttttagactctatttgataatagtttccacatgtccgttcttgaagaacaggtagaacgagctggaatacatccattgcacttctccatttgattcttgaatagtctgcggtttgccgaaagccagtagacattcatcttccgtcatgcctttcaccggcttgttgatgttgatttcattccaatgagtaatcggtgaaagctggttcgttatgatgaagtcgaacattttgttcaatacttgcgattcaacctgtacgaaatcatccatgatttctttgtgagatgctttcttgtccggttgtagcttctccatcggagtgatttttttcattatcactgctgatgactctatccgtatattggaaagataataaaccagtttgccgtcctttacttgaaacagggctttgcaatagtaagtattcttttggcttgagtctgcctgcgaggcaagtatcagatcgcaactgaagtttttagccggtacgttgacctccgctattccttcccgtaactgtggacagacattcttgacgatccatagcagtgcattagcgtagatgttttcgtcttgcatatcgctgaaaggggtaaatccgctgactacatatttattgccgtctgcattgacaggatagctttttttctgttcggtgaaagtctgtgctatcagtgggataatttctaccagtagatacaagattaccagaaattgtcgtttggtcatcatattccgttctttttaagaaaacagcatccacggccctttttgtgaaaagaaaagatcgtggacgctgaataaataatatggtttattgaggtttggttgtccttagaaggcaatacccagacgaatcataaagttactggttttgaatccgtcggcatcgctgaatgcatctataaatccgcgttggtaggtgagatccagattgaaacggtcataccagactcctacgccgatattcataccggcatcaaaatgattgtagtcaacctccatataatctgcataatcaccccaactgatgctttctccatcttctttcattttgcttgtgtaatcgtaactagcgaagactcctacatgcgggtcgatacagacgttgtccgctacagcaaatttccatccgaatgtgaacggagaatattgtatgttgtgagccatacatttcgtgtcgtccactttgaaaccacgggagccaagtccaaactccatcccccagtatcctcctgtactgcctaaaggcttctgatagccaaatgttgcgttatatccgatgtttgaatcagctccttcggccccgtcaccggagaaattcatgatattcaaacctgcacgcaagaaccattgtgtgctgctggcttgcttctctgttttgacgattgcgcttctggatgatacgatttgcgcttgagttcctacgcacaataagagtgcggcaaccattgatagtacttttttcattgttattgatattttagtgattaattcttattcttaacgacgggcgctatctggctttttccatctgtgggtgataacttttgcagacgtatccattcataatcttcttttgtggccggatgccagttgacgaagatgccgggataacctactactgtaaccgtgtatccccctgttttttcattatcttccactttgaaagtggctcccatgatgacatcgcagttgtatttgatggtggacagatacgtcccccatgcacggatgttgtcaagttctcctttcatggcgatttccacttcctctttgcttagtgtccattcatccttgatccgtcccttatcttccagtattttcacctcgacaactgtaggtttgacacaaacctcagtaactgcatcacctgcacgtgcctgtgcgtcgcgaaacttgaagaccgtcttttgcgcatgggctccgacggcacaaccgacaaccagagcaataatcagaaatagttttttcgttttcatgtccttttgtgattatatgttaatatgcctgcaaaggtatgcgaaaggagtatactaccgggtgaaaacatagttccaagaacgatacgaaattgtatcctatttggatacactggggaagcttccggtgttgatgctgtcggacagatcacggaagaaatcgtggccgaggatgtaggagatgcgccagagcaggtggatgtcgatattctctttccggaatatcttgtaaacattggggcgtgtgcagcatagttgggtagcgaaccaggtgacggtgcgtccctgttcgtgaagcgtgcgttcaataagttgtcccgcatgaatcatgtgcctattctgcttatgtgtgtcccccggattcccgttgggcggacaattcaatctattgttgacaggaatatatagaaaaggcgtgggaatctctcaccttcgtccgttccatgttcaaggccttcgcaatgccaattatcgggaacgaacaacgcagaaagcccacgccgatatgtacaacacccgtagcccccctttgtttatcaaagtgaggcacggatgtatataaatacacatcaggaggacgtctttgttgctgttagtcattccgataggtcaaagtttgcgaagttttgaacataaatgacaaacgcttgtaaacgtcttctcaatataaacatctctccctcgccacccggaggctttctgcggaagagaccgttgcaaatgtataaaaaaatacggttggaaatggtaatgtgaatcagaaactttttgaatgcaggttgttttgccctctttttgccctttaccaggcgaaatgcggttgcactggcatcttgtaagaaagaggagggatctttcaattttgggtacgaaacgggctttaaactacaaaagccggggcataatacctcggcttatattttttttcttatcagggagcttttttattcatcagaaaccttttctttcttatcaggaagctctgctcttttcgaagtttctgttttttcaaagattataacaccttgaattcataaccttcctctttcaggaactcgatggcacggggaagtgcgtattgcaggttaccgttgttccatgacttcagcgaatcgtggaaagtgatgatagaaccgtttcgcgcatagcgtttcacgttgttcagcacttgttccgggcgcatccgcttactgtaatcgcgggtcacgagatcccacataatgatgcggtaatgatagcgcaacgtataatactgcctgaatcccatgtgtccgtgtggtggacggaagagatcggaatgaataatatcatctacctttctggcatttgccaggtaatccggattggaatattcaaatccacggatgtggttgaaagtatggttaccgatgcggtgtccgtgctctaccaccatccggtattcatccgggtgtttgcgtatattgtcgcctaccatgaaaaaggtagctttaatatgatgcttttccagtatttccagtacccagggagttacttcggggatggggccgtcgtcgaaagtcagatagactgcccgctcattcgggtccatccggaagatagcttgtggatacaacgcccggaaaagccaaggtggttgttctataaacatgagagtctgtgttttgaagtattaggaaataagtattaagtattataccttacggaaaacatgccggaagctacgttaatacttaatacttattacttcatacctaaattatttccctttcattctcgtcacgtactcgttgtatagctgatcgagttgcgtagagtaatgttttgcgagttcttctgatttgtatttttccattaggcggacttccgcgtcaagcaaactggcgttgtacacgaagttttcgctggcaatggcaagctggttatcgttcaggctaagataccagatcatgtattcgagcgacttgttggcaagctcgtcgataatcttgttggctttctcgttctgtcccagttgataataagactctgccatttggaaggcgccatttgcccagtcatacggtacgttgattgccggaatcatcttttcggcgtaatcgagtgcagcgagtgccttgtccttcttaccttctttgataagctgtcctacgagctgcgtgaagatacggcggtgcgtgtagcacatacgcatcacgttctcgtcgatgtagatacccggcttgtcgataccgccgaacttgaacttgttcatcaggttgtcgtacatcttttcactgtcgatcttgctgtccagtttgtccgtatcgaacggagtgaagcggtaggcgagaccctcctgtgtgaagtggttgcccatgcccagatggttttcgcttcctacggtgattgccatatagataggacgttcccagttagcgttggcaagcatttcgagcatcatcagctcactcttgtagagggcgcgtttcgggttgccgttggcgtctctaagggtgattgtcatgtattcggggatagagtcgcccagagcttccggtattttcatgccggagcggcgtacggcttccttatctatcttcatgacgatgctgtccgtagggatgagcggaagctgtatctcttttcctgtcttcttgagaagttctttcaattggtcgttcttgccaagcatccagcggttgatgatttccttcagttcataaggattctcaccgaagatggagtgaacgagcgacaatatggtagtgtctccctgtgcagccagttcgtttgcctgtttgaaatagctgtcgataagagctttcatttccggacggatagagatatattcgttttgtccttccacgtattccacacggtcccaagtgatagggagtgacggagaatcgtaggccggacgtttcatctggtctatataccagtctgtttgcaggtaacttaagttacaggtgcgggcatccgtacggaaaccttccgtttcctgattgtaccacaatgggaaggtatcgttatcaccattggtgtagataatcgggttgccttcttcctgcaaagtcatcaggtagttctgtccgaagtcgcgggcaacgaagcgtccgctgcggtcgtggtcatcccatgtctgtcccgccatctggatggggacgaacaaacagagcactgaagccagaacggctgccggaagttcctgcatcttggcataatctcgcaacatgcggatgatacctgccactcccatacctacccagatggcaaaggcatagaacgaaccggcatacgcatagtctcgttcacggggttgtgcaggagtttggttgaggtagagcacgatagcgatacctgtcataaagaacaggaagaataccacccagaattgctggatacctcgctggctatggtaagcctgccagaagagtccgattaagccgagaatcagcggcagacagtagaatacgttgtgtcctttattgtttttgagatcttgcggaagcaattcctggttacctaccagtaggttgtcgataaacggaataccggtgatccagttgccgtgctcaatttctccgctaccctgtatgtcattctgccgtccagcaaagttccacatgaagtaacgccagtacatgaagtttagctggtaggagaagaagaatttgatattttcccattgggtaggcatgtttaccatcaccatctctccacactggtcgtaaggaacgtcatatcccttgatgtctacccattgtttgtagagcggtgcgtgtgacgaactgtacatacgcgggaaaagcatattctgtgcatattcgtattccacacgtccgggaagttcgatataagagtctttttcgtcgggcgaagtcttttccttgcggacaaacttacttcctgcttccgattggcgcggaatacaatagccgtcttttacgtcaagtgccactttcgaagagaaagcagggccgtagaagagcggacgggttccgtattgttcacggccgaggtattcgcccagggtgaatatatcctccggtgagttttggtccatcggagtgttggcagtagaacggataacgatcagtgcgtaagaagaatacccgattacgatcatcatggtgcacagtaatgctgtgttcatggtgcgggcggtgatacgccatctctctttgattttagcctgtacactcggagcaagataaagtcccaatgcggcgataaccaaaataccgatgatgatactgctggctccgtgtccgtagaatgggatacccagcaaagcgatcgtcaggataaaggagatagccatgcgcgctttgtttttttcggtgtaactttcgtatacaccccaaatcagagcggccgcaagcagaatgatataaaccactacgcccgaattgaatgacattccgagtccgttgacgaacaacaactcgaaccagccgcctactttcacaatacccggtacgatgccgtaaagcacggctgcaacgagtaccattgagccgaataacgcaattaacgaacctttggcggtagcgtttggagttttcttgtaatagtataccagtacgatggcgggcagacaaagcaagttcagcaagtgaacaccgatactcaatcccgtcagataggcgatgaggataatccaacggtcgctgtgcggctggtcggctacgtcttcccatttcagaatcaaccagaaaacaacagcggtaaacagggaggagaaggcatatacttcaccttccacggccgagaaccagaatgtgtcactgaatgtataaaccagtgcaccgatcagtccgctacccatcactgtgataagctgtcctttggtgatattgttttcgtcagtgataatcagtttgcgtaccaggtgggtgatgctccagaaaaggaacaggatacaggcgccactcatgagggcactcatgtaattcaccattttagcaacagttgttacgtcggaagcaaattgagaaaacagattcgccactagcatgaagaaaggcgcgccgggcgggtgtccgacttccagtttatagccggtggttatgaactccgggcaatcccagaaacttgcggtcggttctattgtcaggcagtagacggttgccgcaatgatgaatgtaagccaacccataaggttgtttacggttctgtactgtttcattagcactatcgtagtttattcgttaaaaacaaattatgaggtcgcaaagatagtgatttgtaaggataatgaggaagaaagtaagaaatattaagtaacaaaggggtgatttactatctctttcactcttccggaaggcagcagagagggaagatacattttaaaacaaggaagccgtatatctatatagagtctatggcaactttaatgatggtgattatgctctcctaaaacccggtgaggcaatgtaccgtgtcccaatagctcgatagggcagttgaagttcctttccagccattcggtagtaacgcctgtatccggatggtaatccagcgtttcgttgacacaggcgatggattttacctgttgcaatacagtgccgatgtcgtgactgacaaggataatggcacattctttattgatttcagccaataactcataaaggcgtgcttcgaaacgcttgtcgatatacgtgctgggttcatcgagaatcaataccgcagggtcggagatgatggcacgtcccaacagggcacgttgcagctgcccgccgcttaattgcccgatagaacggtgttcgagtccttcaagccccatgcgggaaataatctgtttacctttctctttctgttcgggagtaaatcgtgaagtgagcgatttttgtatgcttaatccggataggatcacttcttccacggaaatagggaacttccggtctatactgttgtattgaggcagataacccaggaaagtagaagtggttttagtagatgctttttcaggagtatggaatataatttcccctccggttggcttcaacagaccgaggatgcactttataagcgtcgttttgccgcctccgttcggacctataatacctagaaaatcccgttcgtagatgcttagattaacatcgtggagaacagtgcgaccgtcatatccggcggaaagattctttatttcgattattggtttcatcgttggaaatggcttgatgggttctttctttatacatttattttgttgcagcctgtggcgcgagggctttggctacattcagcatttcttcttcccagtcgtaacttagcggattgatagggatcactttcgttccggtttgctgcgcgatggtttccgcattgcgtttgtcaaattccggttgaacaaagattacacgtacatcttctgcctgacacaggtctatcaaggctttcagatgggcgggagaaggttctttgcccccttcttcgatggaaatctgatgcaatccgtagtcgcgggcgaagtaggagagagccggatgataaatcatgaaggctttggctgcttcgggagcggagagttgacggcgaatcaggctgtcggtgtgctggatacgctggcagagcgaatcgtagcggtttctatagtatacctcatttgtcttatccagttggctaagggctttgtaggtgtttcctgcaatgattaaagcattaccggtggaattccatacgtgcggctctacagcatggatatgcccgtcgtggctgttatgtccgtggtcgtggtcatcattgttgagtatgaggtcgattcctttggaggtgtcgaacacttgaatatggggggtattgttcattaagcgatccatccaggtctgttcgaagccgatgtatccgatgcggaaataggctttgctgtctcccagagacacgagttgttgggggacaggatcataggtttccgggctggaacctttggggaccatgctgactactttaaatttatctccggcaatagcttccgtgaaataacgttgcggttccagggtgacggtaatcaccggttttgcttcgtcatcgttgcttgcttgggaagagcgtcctgtgcaggctgccattaggaggcaggcactaaggaggaaaagggttctcatatcttttagttgttttttcatgacttcttctatttcgggggttcttttttatcttgtttctattcttattttcgggcccgtaatatttcccgtttaccacccggaggtccgggcagacgttctactgtgaatccggctgtctgtaacatccggcggacgacacctttggcgcagtaagtggtcaggatgccgtctctatctaataaaacgtagaggcggttgaatagttcttgcgaccacatttccggttgcttttccggtgcaaaggcatcgaagtaaatgaggttaaatgaaagattcagggcaggtgattcggcgttggttacgctatcattgatattgctcattgttcgttctctgttctcaacccatttgtttacgtctgtctctactttccgtagggtgaagtgtggagtgagttgcacgtctttctcccaaggtgatgtatgaagttgcttaaacaattcgatagccggttgctgccgggcggtcgtcgttaattgttcatcattggagatatatcctaattgctctatcgtctgccattccagtggatagagttccaatcctgtatagtgtatattccgtctgcttctttctgcttcttcaagggtgagccaggcgtttagccctgtcccgaagccgatctcaagaatatgtggagtagtggcggaagaggctttaagtcccatatcgatgaaaatatgttgagactccgtgcgtgcccctttcgttgaatgataatgttcattcaattccggaacaaacagggtagcgctcccgtcgtcggttttctcaataatcctttccatcatacaatctctaatgcttactgtctaacgtctaatactttttacctgatatttaaaatccttatcctgctatagcgtcccaggcactttcgagtgcatacaggagaagaatataacgtatcagtttgccgacaaacatggaaactatggtgagccatgtgttgcttcgcataaatcccagtgcaatggctatcacttccccaatggcgggaagaaaggtgaagaaggccatcaatgctcctttcccttgcaggaatttcaccattttgtctactttctctttctttaccttgaaatatttctcgatccaactgattttgcccagacgtcccatgtagtagcaagtcattccgcctactgtgttgcccagagtggcggagatcagacaggctatcgggggcagaccgagtttcaccagtgccaccagtaccagttcggaactgaaaggcacgatgctcccagccagtaaagccgagatgaataatcccgggagtccccattctatgaggagttgtatcgttgaatctataaaagcgtccatatattaaaagcgaataagaggatgagaccgaccaatgaaatgatgaaaaacacattcgaacttttactattggtcagtacaaagaaatgtccgatcaggatgctgttgcttatgataagcaaaggcaatagggcactgcaatatatcggttgcagggcaatcagcaggaacaggaaaatcgtcaggtctatcaggaattggagataggcgcgtgtgcgtatcttatcctcaaatccggcggcgatgcaatggacggcactgacgatgaacatcaccaacagatagccgagtattgccagttcccaaggctggaggatttgcaggttgaagaattccccgatagtcagtagctgattgaaagggcgatagaacaactccatctcattgtagaagaaggcgtgtccgaacagcatccagtatggcagcatccatccgagcagcgcaccgcagaaactacgcggagtgagcgactggaaacggtaggcttcgagcaaccaaagcaccgagaggatggtgaactgtgggaacagaatacttcccgctccgataaagaagaaggagtagaataaataacccgcagcttgtgtttgctgatagcttttaaacagaaaataaatggaaatgagaaagcccagggcaacaatatctcctgtatataggtaatgcattttcgggcagacggtgaccagcaggaaatagatagccgtctgcatggaagccctcatacggataatgctgaactgattgttcagctctatcagaaagtaaccgatggttgcataaatcaggaagctgacaatccggtctgcccaccccggaagcagaaaatcgcgggcgggttgccaggcagaagggctgccttcgagtacggttgaggctatggaaccgggaaataaaaagtaagtcaacacccagcatagggcgcagataaagataacggcaggcagggtccaccgtcctgccgtcacttgactttgtagtcttttatttctcatgagtttattacttgttatctcttgatactataggtacattcggttgatattccggatattaatatcctgcatgcttgatgttaacaaccatcctgtcagctgttaatacctgattccttaagtattaacaattgtcgtctaaactattaatacttgataactcaactattaatgcttgacaagtcaatgatgttcaacgctatgcggaatagggctacttgcgtgcgaaacttgaattacaaatcgaatccgatatcgcggcggaaatacttcttgtcgaagtcgatcatgtctgccactttgtagctctgtgccagtgcctcttctttcgttgcaccgtaagagcaaacggcaatcacacgtcctccgttcgtcactacttgtccgtctttcatggctgttccggcatggaaaatgatgctgtcggtagcggcagcctgttccagtccgctgatagggaatcctttttcgtaggcttcgggataaccgccgctgacaaggatgacacagccggctgaacgtgggtccatcaccagtgttttttcgttcaggttgcctgcggcagtaccttcaagcagttctacgaagtcgctctggatacggagcatcacgctttctgtttccgggtcgcccatgcggacgttgtattcgatcaccatcggttcacctttcaccttgataaggccgaggaagatgaagcctttgtaagtgatgttttcttctttcaggccgttgatggtcggttcgatgatgcgtgtgcgtactttctccataaatacttcatcggcaaacggaacgggggttacgctacccataccgcctgtatttagtcctttatcgccttcaccgatgcgtttgtagtctttggctacggggaggactttatagtgttctccgtctgtcagtacgaatacagagcactcgataccgcttaggaactcttcgattacaacggttgccgatgcagagccgaacatgccacccagcatttctttcagttctactttagcttcgtccagtgtagggaggataagtactccttttccggcacaaagaccatcagccttcaatacgtatggagcttccagcgtttcgaggaaagcgagaccttcttcgaggtttgccgaagtgatgcttttgtagcgggctgtcgggatgttgtggcgcatcatgaagcctttggcaaactccttgcttccttccagttctgctccttgagccgaaggaccgataacggcaatatgctttagctccggacggttctggaagtagtcgtagattccttctaccaacggatcttcggggcctactactaccatttgaatgttctctttcagagcgaaagcgctgatggcttcaaaatcggttgctttgatgttgacattctcgcctacggcagttgttccggcatttcccggagcaatgtacagtttttcaactttcggactttgggcaattttccatgccagtgcatgttcgcggccgcccgagccaagtaataatatcttcatctttgtgctattataagttatactgttatatatgatttgtatagatgcggtggacttcacaggttttataaattctgctcaaagtaccgggtgattttctcgtgcagatgtacacggtcacggcctgctacgttgtgcttgtggcacgggtagataaacaggtcgggataagtgcgggcatctacacaggctttcataaacgagagggtgtgctgtggcacgcaggtatcgtcatgatcgtcgtgaataatcaacaggtgaccttccagttgaccggcaagattcttcaggttacattctttgtagccttccggattgctttccggtgtgtccatatagcgttcgccgtacatcacttcataataaccccagtcgattaccggacctccggcaacgcctactttgaatatctccgggtaacggagcatcagggcggtagtcatgtgacctccaaagctccatccatgtacgccgatgcgctcgctgtctacgtaggggagggatttcaggaattcaacgcctttcacctgatctttgccttcttcgataccgagacggcggaaggtggcattttcaaatgttagtccgcggttgctgctaccgcgattgtcgatggtgaacatgatatagcctttgcttgccatgtatgtgtcccatccgcgtgcgccgttctgccatcctccggtgacgcattgcgcgtgagggcctccgtagacatatacgattacgggatatttcttagccggatcgaagtttgccggcttcatcaggcggtaatgcaggtcggtagtgccgtctgccgctttgattgttccggtttcgatgcttggcatctggtatccgtcgtaaggattttcggctgtcagcaagttggctgtttctttgaagtttttggtgtctaccaggttgatgacgcggggttggtctttggtggaataacggtcgataaggtatgtaccagaggcgctaagtgttccgctatgttcgctttccttgcagttctcaaacggctcgcttatctttccattacttacgtttactgcaaaatggccgcttctcaagccttctacggcagtgaagatgacctctttacgctttgtgttgaatcctaggatttcgctgaccagccagttgcctttggttagctgttttactttaccggcctggaaataactaccgccgttggcactattataggtttcacctttcatgtttgctgcatttgtctcaaagagataaaggtgattgtagccgtcacgctgactttgatagatgaacttggtagggtcccacggcaaaaatacgatggggttttgcggttcaacgtatttaggatgcatttcttcatagagaactcccatgggttctcctgtctctgcgttgtactggcagagtttggcatgattctggtcgcggtttacttcgatcaggtagaggctcttttcatccggtgcccagctgatgttagtgaaataacggtctgtcggatcgcctgcattcagataaatgcttttaccggtagcagggttgtaaatgcctacttttacctgatggctcgtcattcctgccatcggatagcgtacgttatttacttcgcctacacgtgcagtgatgtctacaagcgggtattgtgtcaccatgctttcatccatacggtagaaagcgagcaggttgcctttcggactccagaaagttcctttgttgataccgaattcattgcggtgcactgtttgtccgcaaacgatgccttcgggttcattggttactgctttctcattcacatatagattgttatctatcgtgtaagccacatttccactggctgcgcaatagtcttcattatttgccccgtcctttggtttgaaagtgctgataacctgattgttcttgaaatcatatacaatgaactttcctgctatcgtgaatagcatttgtgccttgtctgtccatagaaaacggacggaatacaggtgtgataattttcctgctttgttttcttcaagcactttgttgatttgctcgcgagtgataaccattgtttctttcccggttttgggttgaattgaataaagggtatctactcctggcttgatacattcgtcgccccaccattgcagcccgtacaggttttctgcatagcggtaactctcgccgcccggaatcagttcttccagcgtcggttttttggtttcttgtgccataacattgaatccgattggtagtgccaacaataacagaatggctctttttccaattttactcattgctcttttctttattatttgtttttaaatccttctatttttactctgtccaaaggagtctgtcttgattggataattgcacttattttagcaaaggcattaaataggtcgtcaaattgtttttcgtaactttccctatcagaagtaatatcttcttcgagatattcgatgcgttgttttaattcttccaactcctttttaggtatattggatagaagatattggcgcatacgtacaaaagcacggataatattgatatttacttccacagcggtcttggacttgaggacgctggataacataactataccatattcagtaaatgcaaacggaagatatttgatgttatatccttgtcctgttttcaaggtcgcaatttgcgaccttgaaattgcaacttcttcttttgttagctcgaacatgaattcagcaggaaagcgttcaatattacgacgtacttgttccttgaggcgtttagtttcaactccatacatttctgccaaatcaaagtcaagcataactttttgccctctgatttcgtatattttgttttctataatagctatatcatccattttttgtttagacaggttccaatttgtgactgaacattagaactatgatgtaaacttgaagttccaatttggaacttcaagtttttaattaattattaactagtgaattacagggtgaataagttgttgggattataaccgtttattcctcttccttcttcggaatcctcggctcccggtttcccctaaattctcttggtcctcttgaatctcttcctccgcggaattctccccgtggttttctatctctttcatcgccacctttgaagtcgccaccttctctgcgtggcttgtattctccctctctgcgaggtctggattcgccgtcccgacgcggcttgaactcaccttcgcggcgtggcttaaattcttttctttctctgaatcttggagcttgttctccttcaccctctttcttctcttcgccctcttcctggctcttgaactctttatattttccgtcaaaaatctcatatttgcggaattcacactccaacggtccattgaacaaaggaaccttctggcttgccttcaagccaatctggtcgaaacactcttcccgataagaaagcacccatgcttcgtttcctacaaatgcatgtttcagacgttcgccgatcatctggtaaagaccgagcaaatcattcgtagagatacgttccccataaggaggattggtgatgatgattgatttctctttcggctgttcgaactgctggaacggttgcaattttagcacgatatctttcgatacaccggcagcttttatattgtgagtcgcaatctcattcgctttcggattgttgtcatacccataaatcttatgagtaaactcacgctcctgactgtcgtcattgtaaatctcatcaaacatatccgcatcgaaatccacccatttttcgaaagcaaaccctttacggaatactcccggagcgatattcttagcaatcagtgcggcttctacagggatagtacccgaaccacacatcggatcgatcagatcacattctccacgccatccggtcattaaaatcatgccggcagccaatacctcattcaacggagcttctaccgcttcctggcgataaccgcgacggtgaagtgattctccggacgagtccaacgacaaggtacaggtagtctgtgcaatatgaatgttcagaagtacatccgggttgttgatgcgtaccgacggacgtttacccgttttctcgcggaagtagtccacaatcgcatctttcaccttgtacgaaacgaatttcgaatggcggaactcctcactgaatactactgcatcgatagcaaatgttttgttcacatcgagatattcttcccatggaatagcctgtatttgattgtaaacctcgtcagcatctttggccgtaaagttcttgatgggtttcaggatacggatggcggtacgtagacagaaattagccttgtacatcatacgtttatctcctgtaaatgaaaccatacgacgtcctatttgaatgtcgttggctcctaatgctgtcagttcttctgcaagtatctcttccagtccctggaaagtcttggctatcatctcgaattgttcgctcatatagattcttttgattttatttttttgctttagtttgtacgattcttgctcctgcgggcacgttttccgttacccagatattaccgcctacggttgcatcacgcccgatggtgattcttcccagaatagtggcgttggaataaacaattacattgtcttccaggatcggatggcgggggattcccttgataggttttccgtcggcatccagcgggaaactcttggctcccagcgtgacaccctgatatagtttgacgttgtttccgatgatactcgtggcaccgattacgacacccgtaccatggtcgatggtgaagtgagtgccaatctttgcggccggatggatatcaattcccgtttcgctatgcgccatctccgtgatgatacggggaatcagaggaacacccagttccagcaattcatgcgcgatacggtaattgctgatcgctttaatggccggataacagaatatgacctctccatagctttcggcagccgggtcaccgttgtaggcggcttccacatccgttgccagtatcctcctcatggcgggtaacttactgatgaatttagcagcaagacgtgcagcttcttctcgtttggagtcggagcagacgttgcatttcccctctatggaagtgctaaaacataatccggccaggatttgctcacaaagtaaatcaaacaatttttcaatgtttacaccgatgtgataattgatggtccggctgttaatagtagaatttccgtaatatccggggaaaagaatggagcgtgaaagctcaataatttcatacaagacttttgcagagggcagtggttcgccatctttgtgctgatgaaacagtcctttataagattcgctttccgatagctcatcgactgcctgtgtcaaaatgtgggtgaagttcagtggactcattaggtcagttgctcatatttatatgggcacaaaggtattaaaaaaataataaaattcgctgggattcaggataaataatgtatttttgtcacattcaaaacatgacatgaataaggggactgatgaatcagaagactgctatgaaactatttggactgttggggctgttgatgttgttgagttgcggatatgctgatagacaccgcaatagctcttcatgcgaacaggcgttggttgattctctggaagttcgtgtacaggattctttgttttccaatgtgcattattcccgctcacaactgcttgaggcactgacgcagacgcaagattccctggtttattatcgtctgctcgccctttacgggaaaacattttttgtctcttccgattttgattctatactctattacaaccgccgggtaaaagaattttcccgcaatgcttcccaatcttctgaatctctccagtctccacgatggaatgatgtattgtccgatgtctataatatcgaaggcaacgtatggatgcaactgaaccgccctgattctgcaattatcgactataagaaagcctatggatatcgcctggaaggaaaaaaactacacctgcttccggatatttgtatcaatatagctgatgcctacctgcatcgcagtgacttggcgcacactgcttcgtattaccggcgcgccctgtttctctgtgattctttgaacttgtccgagcacacgaaatttcctgtctactacggattggggcagacttatatggaactgcgcgatttcgatttatccaatcattactatgaattggccgggcagttcttcgatgaaatgaacgtgagcgagcaatggacctatctcaacaatcgcggcaaccattattattaccggaaaaactatcaggaggctttgaaatatatgcgcagagccaatgcactcgtatcttcttatccgcagatggtgtttgaacagaactttatcaaagtaaacctgggagaattgtacttgctgactgacaaactggactccgcacagatctgcctggacgaaagttatcgtttcttctccgatatacagcataactcggctgttcattacattgaaacccagatgattgaactggcattgaagaaaggtaatatagcccaagcgaagactatgatcgcccggactgctcctgtggggcatcttgacgccaatatgttgactatacgcaatcagtatctgcaacattattttgagcataccggtgattaccgccgtgcctatgaatacctgaaacgtgattgccatctggacgattccatccggagcgaacggatacagatgcgtgttgccgaattggatatgcgttaccggcaggatacgatagtgcttcgtaaggaaatgaagattcagcgacaggcggcagagatgagagtgctcaagttgagcgtatctatctgggtacttgtctgcgtgttgcttgtggcaggggtagtgatagttgtctggtatatgcgtaaaaagagggagtttcttcgccagcgtttcttccagcaaatcaaccgtgtccgcatggagaatttgagaagccggatttctcctcattttacttttaatgtactgggacgtgagatcaatcagtttaacggctcggaagaggtgaaacataatctgatggaactggtgaaatatctccgtcgtagcctcgaacttaccgagaaattgagcgtatctttgcaagacgaactggatttcgtccgtacatacatcgaactggaacgtggacgtgtcggagaagattttgtcgcaacaatcacggtggaggacggtttagatgcaacccgcatcatgattccatctatgattgtgcaagttccggtggagaatgctattaaacatggactggcgggaaaggacggaaaaaaggagctaatggtatatgtttcccgtgaaacaaatgggattcgcataacggttaccgacaacggacgcgggtatctcccgcaggtagtttccgccacacggggtactggtacaggattgaaagtgttgtatcagaccattcaattactgaatacaaagaacaagagtgataaaatacgttttaatataaccaacagaagcgatggacaaaccggtacggaagtgtcggtatatatcccgtttcgtttttcttatgatttatgatggagacagaagaaaagtataaggtagtcatcgttgacgatgaacgtacagcgattgatgctttgcgccgagagttggagccctatcgtgaatttgaagtaaaaggaatcgcagggaatggtgcaaaaggtaaaaagatgattatggagttgcatccggacttattgtttcttgatgtggaacttccggatacgttgggactcaatctattaagtgaaatcagggaggatattttgtgggatatgaaggttgtgttttacacctcttatgacaaatacttgcttcaggcgttgcgtgagtcggctttcgacttcctgctgaagccttttgaagcagaagacctgaaagtaattatggaccgttaccggaaggctatgacctctacttcgcttcctcttttgccttcttttgcttcttctatcagtgcattgatgccccagcaaggcatgtttatgattagtacagtgacaggcttcaaactcttgcgactggaagaaatcggcttttttgaatatctgaaagacaaacgtcaatggcaggtggtcttgtttaatcaaacttgtctgaatttgaagcgaaatacaaaagcagaagatattatcagttattcacaagcttttgtacagattagccaatctgctattgtaaatgttaattatctggcaatgattgatggtaaatgctgtcaactttatccgccttttcatgataagaacgatctgattatttcccgaagttatctaaaagaactacaagagcgtttctttgttttgtaatgtggacctcatagattgaaatacgccacttcttcagcagaagcggcgtatctttttgttagaatattagaatgagagagagtttatgttacatatttgtattatccatcgtaacggtcatttcgggtaccagtacgtaggcttgttttttagcgttccatttataataattcgtagtaacggtcttgccttcataagtataattgatgcgtaggtctttttcccatgcgttcttgctattgttccatttcaaggcctcgctttcaatcatacgtttgttgtcatcgtacttgtagttgtacttcatgtagttggcaagtgtatttccgtccattttgtaaacggtttgtcccactgtcatgccattctcttcgattggattataaatcaattgattatcgtagctacgtgcagaagtagcaagcgatacaacaagaagagctgcagataaaacgaacatttttaaagatacttttgctttcatggctatttaagtttttgggttatactttcatttgtctaccaaatgcattgattttacgctgcaaatctacatgttaatttggtatttatgcatttttgaagataaaagattgtcaaaatgtcaagagtgaaggtgggtgataactagctttttgccaatattggtgacaaaaaaatatccggcagtcaatctgccggatatagaatgaatcacttcgtcgaaaaaggaatcttttttctagctttctggatacagagttaaataatgttattacccagacttgcctccattttgtaagcggaggtccctgataaggtggagtctccttgtgtaattagtgtctaaaagatagcaattccttattgaggtagtctttattcacttgatggtttaatgtgcctcaagccagtttctgccccatccgcaatctgctttcaaggggacgtgcatgcggtatgctttctccatttcttcgatgacgatttcttctacacgctctttttcattgacaggaacgctgaaatttaattcgtcatgtacttgcaggatcattttggcttgtattccttcggcctgaaaccgttgatagatacgtgccattgctacttttataatatctgccgcacttccctggataggggcgttgatggcatttcgttcggcatatccgcgtacaacggcattccgggaattgatgtccggcaagaagcgtttccggtggaagattgtttccacatagcctttttcctgggccacctggatacttttatccatatatgcttttactcccggataagtttcaaagtaaccgtcgattaactctttggcttctttgcggtctacattcattcgttcggcaagaccaaatacggatatgccatagatgataccgaaattggcagtcttagctttacggcgcatgtcggaacctacgtctttcaggtcggtcttataaattttggcagcagtggccgcatgaatatcgtgattgctaaggaaagcatcaatcatattcttatcctcgctaaggtgtgccatgatgcgcaactcaatttgcgaatagtcggcagagaagaagaggcagccttcatcggggatgaaagccttgcggatttcttttccgttctcgtcgcggatagggatattttgtaaattcggattgcttgaactaaggcgtcctgtagcggttacagtctggttgaaagaggtgtgtacctttcctgtacgtggattgatgagctgggggagtgcgtcgatatacgtgcccaatagctttttcagtccgcgatgttccagaatcttttctactaccggatgtttgtgccggaggctttcgagcacttcttccgaggtgacgtactggccggtcttagtcttttttgccttctctacgattttcagtttgtcaaatagtacctcaccgacttgcttgggcgaagcgatattgaaagtctcaccggccaattcgtaaatctctttttcgatttgctccatctgggcggtgaaatgggcggacgactgcttcaatgcttccgtatccagcaataccccgttccgttctatattaaccaatacgggaactagcggcatttctatatcatagaacaaacgttctgcgtcattttctttcagttctttctccaatacatttttcagtttcagagttacgtctgcatcttcgcaggcatatagatatacatctttcgggtcgagatcgcgcatgttcttctgattctttcctttgggacctatcagttcgtcaatgtggatagtctgatagtgcaggtaaatttccgcaagataatccatgccatgacgaagttccggttgaagaacataatgagcgatcatcgtatcgaaaagtggaccttttactgttgagccataattttgaagaacaatcatgtcgtacttgatattttgtccgacttttaacgaattctcattttcgaagaccggacggaactcatttacgatttttaacgcttcgtcttggtccgatggtacgggaacataaaaagcttcattctctgcaatcgaaaagctcattccgactaattcggcatccattggttcggttccggtggtttccgtatctaacgagagaattttcgatgtaagtaacttttgaataatttcctgccttttctcctctgtatcaataagttgatagctataagtgagcgattctaacgtctctaggttcgatttttttgcttcacccggttcatcgggcgtgaaattcgcaaataaatcgccttgcattccgcctccttcttcgggaaaaagtggaagaggagagggggcactttttccagtagcaactttgcttccggtggcagaggttattccgtttccggaaatatcttttttgagcacccggtcgatgagtgttctaaattccaattcctcgaaaatgctgcggagtgaattctcgtctgcttcttcgcggacaagagcatccatctcaagttggatagggacatcgattttaatggtggcgagaaatttcgagaacgtaatcatttcccgattggtttccacttttgttttcaatgctcctttcagttggtcggtatgttccaataggttctcgatgcttccgaattcggagaccagtttttgagcagtcttttctcctactcccggacatccgggaatgttatctgaagagtcgcccatcagtccgagcatatcgatcacctgtgtcggagactgaatgtcaaacttggctttcacttcctccactcccatcacttcgaaacctcctgtgtgtttggggcgatacataaatactttgtcacttaccagctgcccgtaatctttgtcgggagtcatcatataggtagtgataccctggcgaccggcttcggtagcgagcgtacctatcacatcatcggcttcgtagcctgccacttccagaatggggatgcggtaggcgcgtataatatcctttataataggtacggaaagacgaattgcttctggagtttcttcgcgttgtgctttatattgttcaaaagcctcgtggcggaaggtgggacctgcggggtcgaaggctactcctatatgagtgggattctcttttttcaatacttcttcgagggtgttcacaaaacccagtatggctgaagtgttgaatcctttggaattgattcttgggttcttaataaaggcgtaatacgcccgatatatcaatgcataagcgtctaaaagaaataatttattacctgaatccatagatttaattaatttttcatggtaaaagtacaaaaaaatacggtattaagcgttttattattacttttgtgctcaaattgtgtaataaatggacagtatctcacttatcagaactccgattgaagcggaactgggcgacttcaaagaactttttgatagttctctctccagttcaaatgcattgctcgatagcgtcgtatctcacatacggcagaggaatggtaagatgatgcggcctattcttgttttactcgtggcacgtctttatggagctatatgtccttccactcttcatgcggctgtttcactggaactccttcatacggccagcctggtacatgatgacgtagtggatgaaagttccgaacgtcgtggacagctctcggtaaatgctatctttaataataaagtagcggtgctgacgggtgactatttattggcaaccagcctcgtacacgccgaactgacaaacagtcatcgtattattcagcttgtgtccactcttggacaggatcttgctgacggtgagttgcttcagctttcaaatgtaagtaatcacagtttttccgaggaagtctattttgatgtaatccgcaagaaaactgctgctctttttgctgcctgcacaaaggctgccgctttctcggtaggtgtgggtgagggggaagctgaacttgcccgtttgctgggcgaatatattgggatctgtttccagataaaggatgatattttcgattactttgataataaggagattggtaaacctacgggtaatgatatgcttgaaggtaaactgacattacctgctttgtatgtgctgaatacgacgaaaaacgaggaagcgcaagaaattgcaatcaaagtaaaggagggtacggctactcttgatgaaatagctcatttgatttcgtttattaaagaaaacggaggtattgaatatgcggttcagactatgaatgtctataagcaaaaagcttttaatctattggcttctttgccggattctgatatctgtgcagctctccgggcttatctggattacgtagtagaccgcgaaaaatagttacttccggtattttgccagaagtgaatagcacaataataaccggtcccaatcttctatcttttccgatttcatcgcttttcctaaaaggaaactcttgtctatttcttctgctgtatgaagatctaaagaacataatttggcggcttgctctatgtagtcccaggctttctctttggtgatgtgaccacatgcttgggaggcgcgcgccaggctcacaagcagtcccatatcccatccgataatgcctttttccaagtcatttatccatataatagggtcccttctttcctctgtatatttcacaaatttgtatagattctttccttgacggataaagcgttccactccgaaaaaacgcttttgaatgatgttttcgaactcgttgatgttctctgtagagagtaaataggggagcataatctggtaggagactctgtcgccttcgttgataaggaactggaatagtccggtggcggactcattatcggtgcagtgaaactcctctgttagcagtttggatagcttttgcggatggattccggtctccatggagttgagatagaagccttgcagtccggcttccatataaccgatgcgtagccccttctttttctctgctccgaggatgaggttcagagggttgtgattgaatcttaaggttcttgtatatgcgtccatcctaatatacctccaaaggttcatgaaaagcgtgagaactgttgccatgtattttcctgaggcttcggcaagccgttatgagtatacaagcaacagtcccacgctccattcgatatataacaaaagtatatacatgaaggtgcgtgagacccgtttgcttattaccattcataactttgaattttgccgaattccaggaattggtaataaatgaaacgttctctaatataactaattagctatattttcatcgctaaaccttttacaaagataagtatttttctgaattctcctgtaactatctttagattttcttaaataaaaaataccgcgtcggttcccggagtacgggaatcgcgcggtaaggcgtatttgattgctaatgtagcctttagcttagaagaacttgatttcttcccctttgatgtcagaaagaaggaggttggctaagcggctggttcccaggcggaacagttgattatccagccattcttcacccaatagctcttttacaattgtgtagtaaataatcgcatcattaacggtattgatgccacctgccggtttgaatccaatcttgattccggtcttctggtggtattctttgatggcttcacacatcacgtaagcggcttccggagtagcggcaggctgttgcttaccagtggaagtcttgatgaaatctgcgcccgaatacatggataggatagaggctttcttgatgttggaagcgctctttagtgcaccagtttcgaggatcactttgaggtggcgttccttgcaaacttcctttaattcctgtatttcttcacacattccttcgtagtctccgcttaggaatttgccgatggaaatgacaatatctatttcatctgcaccttctgcgattgctaatgctgtttctgccacttttacttcaatgaatgtctgtgaagagggaaaacctcctgatacacaggctatattgactccgtctacctccagcgtattcttaacgatggctgcaaaattggggtatacacagattgctgcaacatttttaagatcaggatattcgtcgtcaaactgattgactttttcggtaaagtgcatcacacttttgtcactgtctgtactattcaaagtagttagatcaatacagttgaacaggaacttcttaacgtcttccgtgttgttttccggcacttttttctcaatcaattcagctacgcgagcttgaatatctgcatcgctcagattggtattatactttgccaatgcggcattgtacttgttgggctgtgagttattcttttccatgatctttcagttttgggttgttgatatgtcttttattatctcgtttcgttttcttatccatgcttttctggaaagcagtggttatgtctacacctgtctggttggcaatgcagagaagcacccataaaacgtctgctatctcttcatctatattatctttctctccctctttaaaggattgatctccatatttgcgggccatgacacgcgccagttctcctacttcttccgtcagaactgccatattggtcaactcgctgaagtagcggacgccgtatgttttcacccattggtccacttgtttctgtgcttcttccagagtcataattgttgatggttggttattattctttgttttttgtatccatgcatatagtaacgggaccgtcgtttaaaagttcaactttcatgtctgccccaaagatgcctgtgcctatttcttttcccaatgcaccgcttaaatctttgcagaattgttcgtagagtgggatagagacatccggcttggcagctttgatataggaggggcgatttcctttcttggtagaagcgtgtagcgtgaactggctgataaccagaatctcacctccatcttctaagatagatttgttcattacgccattctcatcatcgaagatacgtagatttacaatcttcttgcagagccagtcgatatcttcctgcccgtctgcttcttcaataccgactaatatcagcatccctttcccaatggacgacttacagtgtccttcaatggttactgacgcatggcttacccgttgtatgactattctcattgttatttattctatttcatgattaggaaaggcaaatttacaaaattcagaagagaaaacggtgtgttggtgggaaaatattgtgaattcgctccgtagtcaataggactattcgttattatttgttgtcaattcgctatcttgggtgccgccttggctgacgtatttccttattgttgttcgttattcaaaccttcttttacagtcttggctttcgcttctccaatcacagcggcaatctcctcaaaagaggcttctttgatccgttttacgctcttaaattctttcagaagcgctgtttttgtcttttctccaatccctttgatattgtctaatgccgatgctacctgccgtttgctgcgtttatcacgatggaaactgatggcaaagcggtgcacttcatcctgaatctgtgtcagcaaacggaataacgggctttgctgtttgataccgatagtctgcggaggaaatccaaaaagcagttccgatgtgcgatggcgattgtcctttgccagtccggcaatcaggattgttaagttcagctcatcttcaatcacctctctaacgacctccatttggccttttccaccatcggtgataatcaggtcgggcagaggggcgttttcttcaatagcgcgctgataacgtcttctgacgacctctttcatggatgcatagtcgtcaggtcctacaaccgtctttatattgtatttccgataatccttctttgagggtttagcctttttaaagacaacgcaagcggccacggcatcagaaccctgtatgtttgagttgtcaaagcattcaatttgcaaaggcggtctgtccagatgcagctcttgctgtatctctttcattaatcgcatacttctttgctccggattcagcttttccgcctgttttagacggtcggctttgtattgcttcacgtttagaatcgaaagatccagcaatttctttttatctccccgctgtggaacggtaaatacgatgttgtttagctccaaatcaagttcaaaaggcactataatctctctggattgactcttatagcgttcccgcatttcgataatacccagtgtcaaaagctcctcttttgattcattcagcttctttttatattcgaatgtaaacgcctggttaatggcgccgtttgtaatatgcagatagttgatgaaagcggaattggactcgtcctcttcaatagaaaatacatctatgttgtgcaatacagcgcttactacctccgatttggaacggtagttttctatcagaagatatttctctttcaccttctgtgcttcttcaaacttcatctcaccggctaatgtctgcatcctttccagtagcatacggctgatttcttgtgtgtttcctttcaggatctctttgatttcatcaatgtttttgagataatcctcctgtgattgtagcccgatgcatggtcctgcgcagttctttatatgatattccaggcatacgttaaacttaccagcccgtatattctccggagttaggtttaaactgcaagttcgcaaaggatataaatgctttatcagatccagtactgcatacatggatggtatgtgactatacggtccataatacgaagaaccgttcctgataatcttccttgttctgaaaactctgggaaaatactcgttttgtacgcaaatagaagggtatgtcttgtcatcctttaatagaacgttgtagcgcggcttatatttctttatcagattattctccagcaataacgcatcttcttccgtgttgactacaatataacgaatatcggcgattttgctgaccagcactcgtgtctttcccggttcatgctctttgctgaagtaggagtagactcttttctttagatttttagcctttccaacgtatataattgtgccctccgtgttcaagtattggtaaatacccggtttctcgggaaggttggctacaatccctttcaaatattcattggctctgctttctggttctgtattcataattgttaggtacgaaagatcgctagctgcttacttttgacacattctctgcaaatagaggcaaatcctttataaagacaataccgattctacttctacgtcatctccgaacaaagattttccattcagttctttcaattcgatgatgaagtttacatatacctttttaggctttagtcttttcaccaattcgcaagctgctttcatggtgcctcctgttgccagcaaatcatcatgtagtagaattacgtcgttttcgtccagtgcatctttgtgaatttgcaccgtgtctttgccatactccttatcgtagctttcttcaatcgtttctgctgggagtttgcccggcttgcggattggaataaaaccggcgttcagacgggttgccagaatcggtcccataataaagcctcttgattctatacccaccactttggtgattcctttatccttatacatatcgaacatgatattggataattcctgcaagcaccatggatctttgaatagagtagtgacgtcgtagaacaggattccgggaatcggaaaatcgggtacttcccgaatgcttttgattagtgtttctttgctcataatcattgaattatatcgtttctttaaatgctttgtttcacgtgaaacgttgccgcttatcgtcccgaaagcaccagcagtacgttgatgtcgctaggagagactcccggaattctgctcgcttgcgcgattgtttccggatttatctttgccagcttttgccgagcttcggtggaaagggattgaatggtggaatagtcaaattttcctttaatcttaatactctccaatcgtgctagtttttcagctatcattctctctctatcaatatatccttgatacttgattaggatttcggcagcttcgagaatctcttctttccggtcttgatccgaactcgtcgctttttccagttcgcgttgaaacgccggaacatattctgctatattttctattgtcacttgcgggcggttcagaatctctatcaacttacaaccttgacgtagggacgttgtccctatcttttcgagagcgtcgttgattagtgccggtttcatcgaatagttgcgcgcgaaagaaatgatttgttccacggcttctttcttgcctcttactaactgatatcgatcttcttttgccaacccaagcttaaacgctttctctgttaagcgcatatcggcatcatccatgcgaagcagaatgcggtattccgcacgcgaggtaaacatacggtaaggttcatccacacctttggtaaccaaatcgtcgattaatacgccaatatatgcttcatcgcgagccaaagtaaatgcttctccgccgtggcagttaatgtgtgcattgataccggctatcaatccttgtcctcctgcttcttcgtatccggtggttccgtttacttgtccggcaaagaacaagtttttgataattttcgattccaacgtatgttttaattgagtcggatcgaaatagtcatattcgatagcgtatcccgggcggtagataaccagatctttgaaagccgggatttgtttcagtgctgcaatttgtatttccatcggaagcgaagaagagaatccgttaagatataactcttgtgtcgtttctccttccggttcgagaaataactggtgctgatctttatccgggaaagtgacaatcttagtttcgatgctcggacaatagcgtggcccgatactttgaatctgtccgttgaacaggggagaatccggcaaaccttcacgcagaatccggtgtacttcttcattggtgtagcatgtccagcattgaagttgctttaagtggtgcgtgctagtattcatgaatgagaacttgtggaagtccgattcaccgtcttgtgtttccatctggtcaaaatgaacactacgcgcgtcgattcgtaccggagtaccggttttcatccttccgtaagagataccgtgacgggcgatggattcggtcagctgataagaagccggctcggccattcttcctcccggcaatttatgacgtcctacatgcatcagtccgttgaggaaagttcctgcggtgagcacaatgcatttcgctttgaaggtgacgccccatgcggtgcccaatccagtgacctcaccgttttctacgagcagttcacatacggtatcttgccagatatgaaggttgggtgtattttccagtttctctcgccaggaccaaatgaacttagcccggtcgcattgggcgcgggggctccacatggctggacctttcgagcggtttagaattcggaattgaatggcagtctcatctgtcactaatcccatctgtccacccaatgcatctatttcacgtacaatttgtcctttggcgattcctcctacagccggattgcaactcatctgtccaatcttgttcatgtccatagtgatgagacaagttttggaacctaaattagcagcggctgccgctgcttcacaaccagcatgtccggcaccaattacaattacgtcgtacttaaaatccattcctatcttatttattatcaaacgctgcaaagttacagaaaagttgtgagacttgtatcttcaagctgtttttgcttctgaaaatccgaggaggaatccggcttaactgaaaaaaacgccgtaatttcgggttagaaatatgcagattgttcgaaaatagaccgcttattggcttttgtgattgtatatttttggatggaatggcaatagtttgtcttttcaatcccctgttttgctttctttttgttagttatgtgcttgctcaattatgagtgcaactagagagtaaaaggaaagatttgttgaaaatacggattgctgtgggaataaacttgaggtttacactcaaaatctaccctacgtcttgacataagtcaaaaaaacaagcctgaatgtgtttttttgtatagtggcttttgttgttttcgcaaacagctatacctttgcagtgtagtcgtgaaactacttatattttaggtattagaaaaaggtaataattaaaaggtattagtttataaaactaaggtattagattttaagattagtttttaggaaaaagattgttttgattaggtattaggaaaaagacgttttcaggtaaagagtaaatgaaagatgaagaaaaagaagaatcccatttatggggattctttaaaggtggagcggaatgattcgctctttttttgtgccctttgttcattctcttcacattgagataagtctcaatttatcagtctttttacgtgattcgttgagtgaaaatacctctttcacatccttcacagtcgtaagcgtctccgcgattctatatagtgtattaaaataaaaaggctaatgatccctttttagtcattagccttttcccatctgtcaggaagcagttccctgtatttttcaattggtgtgttcggttgccattcggctgttctgtttatcacatccgtgagatactcaaatagattcactttatgcatcctacaagtgagtgctatcgtatagagtatggcgcctcgttcggcccccttatggctgccgaagaacaatgagttttttcttgataaggatatgtaccggttcatccgttcaaccatattgttgtccagataagtgtcaccataattaaagatgtccaccactgcattccactcattgcgaagataggtaatggcttcctgcagttcgctcttaggtaataaatccccccgttcttctatttcatcaaacacatcttttatttctccgagtatgtccggcgcatatttttttcgatgcataagattctgttctaccgtccatccctcaaccccaactttatgcttatgctcgttttgataaagtgcgtttatcagctccacgatcctttttgcatccgggtccttctcaccgcaatctataaatttccgttttatatgttgcaagcacgggatgcgtgtgatattgggataagcatcgctttcgagcttccggtaaggtgagtaaccatcactttgtatgatacctttgcaactgcctaattcgttaagaataactctttcagaccgggagccgtcatcatagagcaagtatatcatcctggtgtttatgccgacaaccacccaaaggtatcccttcctgactccttttcccttgctgttcttttccgggacgagtattttgtaataggtttcatcggctgccttataaggatcactcaaagctgtctgccggatgcacttataaagattttcgaagaggtttgaggctttctctatcaacttatgagccgtaggtttcttcagcgtaaagccatgactctcgaagtagttgatgattctttcaacaggtagcgattgtatataacgtaattccatcaatccggcaataaatgaaccgtcatagctggaattcaagaaggccgaggccggtgtttttccctcaaacaggcgaccttcttgtgtataggtgtgtatcttgtagacatgcttgatgaagcgcatgggtacacattcatagcggacgcatattctgggaacagtggtaaacaaccgggccttattgatgtcaaaatcgggatcatcgggataaacgacatgttcttcttcctccatctcataatgcatgtcacgtttggccccattgttctttcttgctttacgcttatctgctttttccgcttctatcttctgccgctcttcttcggatatggcagattggggagcctgttgctgttcggatgtgttggatacaagtttggcgagtcccttaataaggcgctgttgcttgctaagagattcgcctttttgaaggagtgcctctttaagggaagaaacctcctttatcaaagcatctatttggtccaagagtctgttgttgtcatctcgtaatcccttgatttgttccttcaataactctatgatctcatcctttttcatggcataaagatataaaaaatcaacgaattagccaaataaaccggatgatatctttattgcaaatgtctaataatcagaatgttgaattagatcctaaaacgttttctcaaccgtacagactttaatgacactccatttaagataaaagacaaaacctgataagaaatctcgtaattgcctgtattggggttaaatgtcggtaactcaaaacttccaccttcgaggcgcttgtagtacagaagaaagccatcgccatcccaacgcagtatttttacactttgtcggtttttaccaaagaataaaaagatatctccggaaacgggagacaagtccttcatttccgatcgtataattttgaataaaccgtcaatgccaaggttcatacgaacaaagccctggtacagatagtatcgattggctgatgttagagaatacatggatctccctcctttctttcgtaatcgcgcaacattttaatcacaccaccgggtgtggcccgtttgactgaaatggtggttccactgttaaaggtgattgtgatcccggcaagactaaactcttcttccgacaacatggcgggtgctatttgagtgaatgaaggagaggaagttgtcggttgggagggttcaacgccgccataataatcacggaccacatctgccttggcttgtttaacgctatagccccgtctggacatccaggaactcataccaccaaaagtggtatgctgatcgcggcaaacatcggctaaagaacaattgtagtctactttcaatacttcaaggaaatgtttccaagtttttccaaatcgattttctgctaaatccataatgcttcatttttatacatcgcaaaaatataagaatgaaaaaagggcgacaagatagaatcgcggagacgcttactcacagtcactaccgtgaaggatgtgccgcatctctggatacgccataataaccgggagcaggcacatacatcggctgattgcgcaaaccgatattcaccagctttccttctccacgcaaacgtaccaaatgcgttttggccgtagtacgtgccaaaccacacacttcctgaaaatcacggcgggtcatcatctgatgttcggcaaaatattctttcaacagcatatcaatctccacctctgacaccttctccgaatgacggacatacttggactgattggcgcggacacccacaaaatgtcctttcagattactgtcagggcgaaatcggacagttttgaaagccaccttattagtcttatgcggagtgctacgagtcactttccccgtagcagccaaagtgggataaaaatagccgatcccctcgatatgtacttcttttccctctcgcaacgactcgccgagaatcttcgataagttatcaagcacattctttacatcgcccacagtcaacgaactgtagtcatgaatcttgtaacaaagagtatccgtatccacttttccattcataaagatacgcggatgcaacgccgcttcttcttccgaagaagcattaggattttcataccaatcaaacacaatagccattacttcttatcaatttaaatgtgtaacttcatcataggacaactttaatcggctattcggacgattggaatcggctgttcagtcaactattgtcagccaaccggacaactccagtcggcttttcctaaacaagcactaaagatacgacaaagtaacgatatatcagcataggaaagcttgtttttcgtttcagaagaaaataaatattttcttagttaaatacttgcaaaccccatatttcatgttataccttagcagcatcaaccggtcgaaaaaacaacatttattcatttaaaaaacaagaaaaatatgaagacattagaatataactcgaaacgtttggcaaaaagaatacaagcattgatgaaagaatcgtcaaacgtcatcgtttcaccgaacacttcaaagaacgtaccgaaaatgcaagaaatagatgaacaggaagcatataaacaagaagtacataaacaccccgtccttctaacacgacaagtgattgactttttgaaagtacgatatgacttccgctacaacttactcaccgaagaaaccgaatttcgcccctccgggcaacgagaaattcctttctgccgcatagacaagcgagaactgaatactttctgcctggaagcccacaaagaaggaatcaactgctgggacaaggaccttcaaagatacatttactctaccctagtggaaagctaccaccctttccggctttatatgaacgaactacctgcctgggacggaacggatcggttgaagcccttggcgaagcgagtatccgacactcctatatggataaaaagctttcacacctggatgctcggacttgccgcccaatggctgggagtgaatcaaacacaagcaaacagcgtagccccgatacttatcagcgaagaacagggacgccataaatccactttctgccgtatgctgatgccgccacaactagcccgttattattcggataatctgaaactaaccgcacaaggcaatcccgaacgtctcctagccgagatggggttactaaacatggacgaatttgataaattcggagcacaaaagatgccgttacttaaaaatctgatgcaaatgtccagcctcaacatctgcaaagcctatcagaaaaatttccggtcgctgcctcgtatcgcctctttcatcggaacaagtaaccggactgacttactgtgcgatccgacaggcagccgcagattcatctgcattgaagcggagcatgatattgactgtaccggaattgaacattcacaaatctacgcccaactgaaagaggaattgcttgcaggtgcccgtcactggttcaacaaggaggaagaacatgctttgcaacgtcataatagcgcatactatcatgtcaaccccatagaagacattgtgtgcaacatatacgcgcctgccatgttggatgaaccggattgtctgtcactctccgccgctatcattcatcaagaattgaaaaagaggtttccggctgtacttcgtaattgtactcctatccaattggcgcagattctgactgcaacgggtatcagtcgacagcatacgagattgggcaatgtgtatttggtgaagaaagtgaagggctgtggtaagcgtctccgcgattctatatagtgtattaaaataaaaaggctaatgatccctttttagtcattagccttttcccatctgtcaggaagcagttccctgtatttttcaattggtgtgttcggttgccattcggctgttctgtttatcacatccgtgagatactcaaatagattcactttatgcatcctacaagtgagtgctatcgtatagagtatggcgcctcgttcggcccccttatggctgccgaagaacaatgagttttttcttgataaggatatgtaccggttcatccgttcaaccatattgttgtccagataagtgtcaccataattaaagatgtccaccactgcattccactcattgcgaagataggtaatggcttcctgcagttcgctcttaggtaataaatccccccgttcttctatttcatcaaacacatcttttatttctccgagtatgtccggcgcatatttttttcgatgcataagattctgttctaccgtccatccctcaaccccaactttatgcttatgctcgttttgataaagtgcgtttatcagctccacgatcctttttgcatccgggtccttctcaccgcaatctataaatttccgttttatatgttgcaagcacgggatgcgtgtgatattgggataagcatcgctttcgagcttccggtaaggtgagtaaccatcactttgtatgatacctttgcaactgcctaattcgttaagaataactctttcagaccgggagccgtcatcatagagcaagtatatcatcctggtgtttatgccgacaaccacccaaaggtatcccttcctgactccttttcccttgctgttcttttccgggacgagtattttgtaataggtttcatcggctgccttataaggatcactcaaagctgtctgccggatgcacttataaagattttcgaagaggtttgaggctttctctatcaacttatgagccgtaggtttcttcagcgtaaagccatgactctcgaagtagttgatgattctttcaacaggtagcgattgtatataacgtaattccatcaatccggcaataaatgaaccgtcatagctggaattcaagaaggccgaggccggtgtttttccctcaaacaggcgaccttcttgtgtataggtgtgtatcttgtagacatgcttgatgaagcgcatgggtacacattcatagcggacgcatattctgggaacagtggtaaacaaccgggccttattgatgtcaaaatcgggatcatcgggataaacgacatgttcttcttcctccatctcataatgcatgtcacgtttggccccattgttctttcttgctttacgcttatctgctttttccgcttctatcttctgccgctcttcttcggatatggcagattggggagcctgttgctgttcggatgtgttggatacaagtttggcgagtcccttagtaaggcgctgttgcttgctaagagattcgcctttttgaaggagtgcctctttaagggaagaaacctcctttatcaaagcatctatttggtccaagagtctgttgttgtcatctcgtaatcccttgatttgttccttcaataactctatgatctcatcctttttcatggcataaagatataaaaaatcaacgaattagccaaataaaccggatgatatctttattgcaaatgtctaataatcagaatgttgaattagatcctaaaacgttttctcaaccgtacagactttaatgacactccatttaagataaaagacaaaacctgataagaaatctcgtaattgcctgtattggggttaaatgtcggtaactcaaaacttccaccttcgaggcgcttgtagtacagaagaaagccatcgccatcccaacgcagtatttttacactttgtcggtttttaccaaagaataaaaagatatctccggaaacgggagacaagtccttcatttccgatcgtataattttgaataaaccgtcaatgccaaggttcatacgaacaaagccctggtacagatagtatcgattggctgatgttagagaatacatggatctccctcctttctttcgtaatcgcgcaacattttaatcacaccaccgggtgtggcccgtttgactgaaatggtggttccactgttaaaggtgattgtgatcccggcaagactaaactcttcttccgacaacatggcgggtgctatttgagtgaatgaaggagaggaagttgtcggttgggagggttcaacgccgccataataatcacggaccacatctgccttggcttgtttaacgctatagccccgtctggacatccaggaactcataccaccaaaagtggtatgctgatcgcggcaaacatcggctaaagaacaattgtagtctactttcaatacttcaaggaaatgtttccaagtttttccaaatcgattttctgctaaatccataatgcttcatttttatacatcgcaaaaatataagaatgaaaaaagggcgacaagatagaatcgcggagacgcttacgggctgtgaagagtgagaatgatactacctgttcacataagatatctgtgaataagatggttacgcctctgtgacgactgtgaatgacagcatatatcatagcaatcagaaagtagtaaacaatcaagtcccgaacatattttgattggtaatgattttattgcaaataatgttattactaatcgaagtatttcttatttttatattcctctttaaagcttgcgccttttgtgccctgttgcattttattttttattttgtaagtcggcaaggtctgcgtttctgaaaaaaacaatatatttgcattcataaatatcgcaaaagtaagtagttacggtgatttttataaattttgttctcttttttcgcaggaaaagtgacagtatgaacgataaaattgacatcatagtagcgggagtaaaccggaaggataaaaagatgtggggcgatttctacgatcgtttttatactgctttatgtgtttatgtttccaagatattgccagtccccgatgcggtggaagatttggtacaggaagtttttatttctgtatgggaggggaagcgtaccttttctgatattaaagaacttaccaattatctttatcgtgcctgctataataatgccttattatatatacgtaataatcaaattcatgatactattttaagttctttggcggaagaagaaagtatggtggacgaagatacgatttatgcactgacagtaaaagaagaaattatccggcaactctattgctatatcgaagaacttcctgccgaacaacgtcggattattttaatgagaattgagggacatacatgggaagagatagcggaacgtctggagataagtatcaatactgtcaaaacccaaaagactcgcagctataaattcctccgtgaaaggttgggggattccattcattccataattctttttttatttttctaaaaataaaaaaacattctgatacttctttgtctttttattgattgattaaaatttattctatttgttaaaatcaaatctttttcttctatataatgacattatgatatatttctacctctaaattctgattcattattcttttatctcaaaaagatgtcatctttttgtcacccgtttttatgagttgtgtatatctataataaagatgaattaaacaattgtttaattaaaaaaacgcaataagatgaagaagttcgaaaatgtatatcaagacgctgctttaatgagaaaggttcttttgggggaggctgatgaagtggaacaaaaagatcttgagaaacggttggcagaatgtccggacttacgaaatgtatacgagcagttacagagcggggagactttgaaagtcgcctttggagaatatcaaaaatattcgtcaaagaaagcttatcagtcttttcttcagagtatcgggcagatggaatcgaaaggccggaagagtcgttctcgtcgggtggggtggtacgctgctgcggctgtcgttactttagccgttgctctttctttctatatgtcgaattatatctcatcggaaaaagaagggaaaactttgattcagccgggaacgcagcaggcacaattgactttgtccgatggcagcgtgattgatgtgcatagaaaagaagtaagcgtagtagtagatggcgttcaagtaaaatataagaaaggagtgctgtcttatcagcctaccgtcacgacacaacatgaggagaaaaacattgaagaacaatctggcaaatcaaatgaactggtaataccgcgtggaggtgaaaatactgtaatccttgcagatggaacgacagtacatttgaatgccggttctaaattgacctatccggtacgttttgccggtaaacgtcgaattgtgcgtttggagggtgaagcttattttgatgtagcaggagatgagaatcatccatttgtggtacaaactcatctcggggaaataactgtacttggtactgaattcaacgtgaatgcttatgccgatacccctgtttgttatacaaccctagtacatggaaaagtgaaattctctacattaaatgcggaaacggttactctctcaccgggtgaacaagctgttgtatttgccaatagttcaacgaaacgcaaggtggatttggaagaatatgttggttgggtagatgatatgtacatctttaatgaccgtcccttgggcgatataatgaagacattcgaacgctggtacgacatacaggtttattacgaaacccctaacctgcgcgacattacctatagtggtaacttgaaacgctacggaacaataaattcattcctggatgcactggaactgacaggagaccttacttataaaatcagtggcaggaatatattgatatatgacaaagtggaagaacaggaatggaaaagatagaatattagaatagttagaatattaggtacacaaaagtttaattattaatttatgagagaaaaacgatggctgctatgttttctagtggcaatgtgctgtacgtttagtgcatgggcattaccgtcacaagacaagacggtgactttgaaactgcacaatgtctctatagagactgtcctggatgcagtgaaaaaacagacaggtgtgaatatgttatataattcacaaatgttcaagggtgttccttcggtatcacttgatgtgaagaacgagagatgggatacaactcttaaattagtgttgaatcctcaagggtttgactatgtgatgaaagacggtattgttgtcattcgaaaacaaaagcgtgaaaaccgtgtccgtggtatggtgacagactcacatggagagccgattcccggagctagtattattgttaaaggtactcgtacaggtacttctaccaatattgaaggtgaatttactttggacgtaaaaagtgataaggtggtgttggaagtttcttttataggtatgaagaagcaaactgtccaagtggatgctactcgtcggaaaacggttgaaattacattggtggatgatgtcaaaacattggaagatgtggttgtgaccggatatagcaatgtacgtaaatccagttttacgggtagttcgactcagatttcgggtgatgacttgcgtaaggtgtcacagacaaatataattggggcgatccagtcattcgatccctctttccgtttggtagataacgtacaatttggttctgacccgaatgctttaccagaaatgtatattcgtggacgttccggttttggcgttaaagaactggataaagatcagctttcaaaatcaaatttggagaataatcctaatttaccaacttttatcatggacggttttgaagtaagcattgagaaggtatatgacttggatcctacccgtattgagagtttgacggttttgaaagatgctgctgctactgctatgtatggttcacgtgctgctaatggagtggtggtaattactactgttgctccgaaagcaggagaggttcgtgtctcttataactttacaggaacgttggaaatgcccgatttacgggattataatttggcaaatgcatcggagaagctggaaatagagcgtctcgcaggattatttgataaaggacaagctaacattccatcgactgcggtagggatgaacaactattataagaaatacgctttaattcaaaaaggagtagatacggattggatgtctattccacttcaaaattctttcaatcataagcacagtatttacttagagggaggaacacctaatttgcgttatggtgtggacggttcatttaatatagcagatggtgtgatgaagggtacagaacgtaatcgctatagtgcaggcttctctttggattatcgcatcaagaatttgcaagtaagaaactatgtatctttcgggcatacgaaatcgaaagaatctccgtatggttcgtttagtgattttagcggactacagccttatgactctccttataaagatgatggaacactccgggagaaactcacatattcgaaaattagcggacgtgacaataataatccgctatatgaagcaactttgggtaattataattggaactcttatgatgaggttattgataatttgagctttaactggtacctgaatgattactggacggttaaagggcagttcagtgtaacgaagaaatattccaaatcagagaagtttattgatccgctttcaagtaagactagtgttacaggttcaaaagataataatcttgccggtgatttgtatacgacgaatggagaaagtttggattggaattccaatgcttttttatactatacacgtagctttaacaagcagcacaatttgaatgtttcagcaggttgggaagcagcttcaggtaccactgagagtaccaaatgctcattatcgtggatttccgtcgggtgagtttcactctctgaattatgcggcggaagtatataagaaacctactcgtactgagaataccacacgaagggttagcgtattagcttctgccaattatacgtggaatgatatttatttggtagacgcttctgtacgtttcgacggttcgtcagagtttggggcgaatcagaagtgggctcctttcttctctggaggtttaggtgttaatattcataactatgatttcttcaaaagtaacggatatatcaataagttaaaattacgtgcttcttatgggcgtaccggtaaagttaatttcccggcttatgctgcaacgacgatgtatgaaactttatttgatgaatggtatataacaggttatggggctgtattgaaagctttaggtaataaagatttgacttgggaaaagacggataagctgagtgttggtatcgaaacaaaaacgttccatgatcgcctgactgttgatttcgagtattactataataagacaattgacttggtgaatgatgtcactctttcccaaacttccggtttctctacttacaaagataatatgggacaagttgccaacaaaggcgtagaattaaaacttcgtgcggatatttatcgtgacagaaactggaatgtggcgttatggggaaatatggcgcacaataagaatgagattctgaagatttccgactctcagaaagcatataatgagagagtggccgcttattataaaaatgaagcactttatcaagaaacattagggctgtctcatggtgcggaatattcggtaccactgccacagtatgaggaaggagcttctctgacttcaatttgggctgtacgttcattgggcattgatcctactacgggtaaagagatctttttgaaccgtgatggctctatagctgataagtggaatgctgcgcaggaggttgtagttggaaatacagaacctaaatgtagtggtgctttcgggttgaacctgtcgtataagaattggactctgtttgcttcatttctttatgagtggggtggacaggaatacaatcaaacattggtcaacaatgtggaaaatgcggacttagtgaacaagaatgtcgatttacgcgtattgacggacagatggaaaaaaccgggtgacatagctcagtttaaagatattaaagaccgggggatgactactttgccaacatcacgtttcgtgcaggataaagcattggttcgattgaattcattgaatgtcagctatgattttaaccgtgactggataaaaaaacatctccgcatgaatctgcttcgtctggaagcttctacgagcgacttgataaactggtcctctattaaacaggaacgcggattgagctatccgagatcttggaaagtggaattctcattaaaagcacagttctaaaaaaagaagaaaaaatgaaaaagatatatacaataatatttgtgtcatgtctagcagctatctcgttcagttcttgtagtgactggctggacgtgagacctgcggatgagataaaggaagaatatttgtttgagacaggaaatggttatcgtacagctctgaacggtatataccggaagttggcgactttcgatttgtacggtagcaatctgagctgggggttgatagatggctggggacaggtatatgacttggacaaagcccccgacagcggtggtggtaaagctatgaagaaattatcgaagtttttgtataagaactctgaacttactcctacaacagatgctatgtggagcgcagcgtggaatatcatagccaattgtaataaccttgcacagcaggtggcagaggaagatacaatgctgttctacaaacgtacgcaggagaaaaatatgattttaggagaagctattgccttacgggcgtatatgcattttgatttgttacgtatatatgcgccgtctttggctatgaatccgggagataggctttttattccttatgtggacaaatatccatcttatttatccgatcgacaaacagtcggttactgtttggaacgcatcatcgctgatttagtagaagcgcaaaagattttgaaggatgtggataagtcatcagagtttacttcgggtaatcgttttactaagtctccttccggagaagaacgttttgtgtggtacagaggattccatcttaattatcatgccgtaactgcggagttggctcgtgtttacttatatgcaggacaatcggaaaaggcctatgaaacagcgaagttactaatagatattaatgctgataaaggttattataaggcagtaacaagtagttatagtggacctatgaatatagagaatgggaatataaagatgtatgaagacattatatttgcattatattctacagatcagactgattgggatttggagattaatcatgcaagtgataatgctaccaaaccggatgatgaaaagtatctggctttgagtgatgctgtgataacgaaattcttcggtaccgaaagcgataaagactggcgtcttaagtatcagttaggaccgaatacttcttctttttatcgttcattgaagtataaaaaacaagatgaaggttctggttttggtaaagtgaatagtacaatggtgcctatgattcgtatgtctgaagtatattatatagctgcagaggctatttatgatacagataaggaattggccaagacatatcttaaaactgtgaaacaagggagaggtattagttctcctgaccttagcaaatcgggtacgaagcaagactttattaatctgattgttgatgacgcccgtcgcgagtttattggcgaaggacagactttctttttatacaagcgtttgaaacggaacttggaagggtcggatgaaaagcagtccgtagaatatccggcgattgaagataatttggtgatgccattgcctgattcggaaagcaatatttaaattttgaaagattgaagatatatgaaaagaataagtttttatatagtcattgtattgttgggagtctccttctttacttcttgtgaggagcaaggattactgacccatacaaatgatgtgtcatatattgcatttgagaaaaatatgacaacagatacaacaggtgtatcttttaagttttacaatgaaggtgaaaatgctaagatattattaggagttaccatttctggaaaagtacaggataaggatttggagtttacggtcagtgtagatccggaacgaacgactttgcctgctacccaatatgaattgccagagaagtgcgtaattaaagcaggagaactaaccggagaaatattggtggttctgaagtattacgaaaaattggatacgaaagctgaactgctgacgttgcaagtgaatgacggtggtgaggttcgtcaaggtccgagtgtctattcacgtgctattatttccgtatctaatttgttgtttgcacctgagtggtggactagaaacgacggtgatgtgaataatccctacaacattgttgaagaatggtatttggggaggtattcggaaaagaaatatttaatgtttttggaagaattgaaaaaagacggggtggtatttgacggaaaagatatgtttatattgcgtaaatatgcactgcgtctgaaaaatagaattaaagattataatactcaacatccggatgaacccatgagtgatgagtatggtaaaatggaaattcctgttgccggataattaaaaaacggaagaagtatgaaaaagataacagtttatattttattactacttttattgagtagcatttgcagttgcctggatgataaaaacaattatgattatacaccgattaatgaactgaaaggcactattagtaatattgaaaaaaactatagtgttgggatagatgaagacttagttataacacctacgtttgagtttacaattgataaaacagatccggatgtgagttacgaatggagactagacggagaattgttgaatgtaaaagcaccttcgtatactttcaattctcataagatcggattgtttgaactcacattttccgtcatcgacaataaaacaggggttaagtactctgcgtcaacagacattttggttcgttctccttatcagagaggatgggtggttttgtctgacgtagatggaaagtcaacactttcatttatcaagattaagaccttgtatggtgtgtcagaaactgtgaatatctggggtgagaaagtggtacgtgattctatcgcatatcattctgtcgaaaagtatttagtcaaagatttaggaaccaaccccaaaggtgtttttgagcatttgggttatcctagtactttcggacaggtagagactgtatatgatgaactggtagtgatgcaagatcgttgggtggagctgaacggtaatactttggagcgtgaagtatatacagaggatgagttctatggggatttgccggtgggaggcttcaaacctgtagaagctgccatgtcttactctgcaaaatttattcgtgatgaaaatggatatatttatatgcacacgaagccggttgcaaatgattttcatgctggagcctatatgtctattccactgtggaattatactaaattcagtgctttatatcctgtacagaagtttaaggacagaaatatggatgcggttctggctctccgtgaagaggataactcattggtaattattcgaaatggaggtggggtgaagaatagttccaatgatccgacattttatgataatacggtgaaggataccggagaaatagttgaatttgaaggagaggatgctaagaactttcagaatatgcgtgatgaaagtattgtaacaatgaaaactgcgtcagttaatgtgaatggcgacatgatgcaagcatgggttgccttgatgaagggtaacgatatgtcttatcaattgcgctatttcagaatgaagaataaaaaatgggatatatatgattattatgaaaatgacttgacgtcattgaaaaataaagagtatacagatatggctgtatttgaacaaaagcagtatgttgttattgcaatggggaatgaattgtggtattgccaatatgtgaaaggtatggcatctgctccaaaattgattcatacatttgacaagaaggtgattgctctttcatctaatgatatatatttgtatccaaaatatggagtttacaacggtcagttaggggttgccttggaagacggaagtttctttatatatggggtggaagagaaggacaagcaagaatcaggattggttaatgatgtaaaaataaaacaattatacccgaatgaggaaagtgagaaggagggagataataattttggaaaaatagtggatgtactatataaaataggaaatgctaaccagattgttcagtatgacctttaaaataacttgatctatatagattatgcggggaatcgcattgagtcttgaatactttatgtgattctcctttgtttatttgaatatgagaaaaagaatattatttatagttttatttgcttggtcaggcattctgcatgctttttcccaacagcaggccaactatgaattggcaaatgaatttcaggctttcggtttagggggtaattttactgctaatagtctaaatctctggccgaatgaaattaatggaacagataagttttggtttgaatttcatacgactgtcgggaaggattactattttgtagatcctgaacgtcggttaaaagaaccattgtttgataaagggaaactggcatcgggaattgcacagattactaggggtgtagtggacaggaataaactggagttgagtgatatcaaattttctgaaaacctggcttctttttctttttcttataaaggtaggaactatgaatataatcgcctgacacaccagattgtagagaaaaagaaagaaaagagtcggtcattatttgatcgttactcatggatgaaatattcgccagacagaaaatatcttgtgtatgtgaagaaacacaatctgtatgtgaaaggtaatggggagatgggaatggatacgacggaagtgcagttgaccactgatggagttcggtattattcttatgtgcatgatggaggaacggacgaagaaggagaagtcatgtctgatatctgttggtgccccgattcaaggcatctttatttagtacgcgaagatgaacgtctgcttagagatttttgggtgataaattcgttggatgacaggccttccctgactacttatcgttatgaattccctggtgataagaatgtaacccaaaatgaactggttatagttgacgtgattgggcgtaccgtaaaaaaaacagacataagtaagtggccggatcaatacataaatcctttgtgtgtgacaaaggatagtaaatacctcttttttgaacgtacgaaacgtacatgggacgaagtggatttgtgttctgtcaacctctctacaatggaggtgaaagaaataattcatgaagttgacaaaccgtatcgtgatccgcatgctcgtagtgtcgctattttgaatgatggtaaagatattctttttcgttcggagcgtacgggatgggggcattactatcattatgatggtaatggaaagttgaagaatgtgatgacttccggtgagtgggtggcaggtcagatagcttctattgatactttggggcgaacagtatatctatatggatatggcagggaaaaagatattgacccatcttattacatgctctataaagtgcatattgatagggaaggagtaactccattaagtacggaagacggtcagcatcaggttaaattcctgaagtctaatagatactatattgacacttattcaagagtggatatggaacctaaaatcatgttgaaagataacaagggacaagggattcttgaattggcaaagccggatattgaattagcctacaaagccggatggaaaaaaccggaacgttttgttgtgaaggctgctgataatataaccgatttacatggagtaatgtggaaaccggcagactttgattctactaaggtatatccgattatttctgtggtatatccggggccttactttggtcaagttcctacttcatttaccttagaagacagatgttgtacccgtttggcgcagttaggttttatcgtaattgctgtgtctcacagaggagatactcctatgcgtggaaaggcataccatcggtttggttatggtaatatgcgtgattatccattagctgatgacaaatatgctattgagcagttagctcggaggtattcatttattaatggtaaaaaagtcggtatctacggtcattccggtggaggatttatggctgctgcagccatctgtacttatccggacttttataaagctgctgtctcctgttccggaaatcatgataacaatatctataatcgtgggtggggagaatgctataacggtgtgaaggaagtggaaaaagtagtaaaagatagtttgggtaatgagacaaaagagtatggatacaagttcaatgtgaagccgaatacggagattgccaagaatttgaaaggacatttaatgctcgtcaccggtgatatggacaagaacgtgaaccctgctcatacttatcgcatggcgcaggcattgattgaagccggcaaggattttgatatgctggtgattccgggtgccggccatggatatggttctgctgataagtattttgagaagaagatgtaccgtttctttgccaagcatttgctgggtgatactcgtgcagactattggggagatattaaccgtaacaaataagacaatagataagattttatgaaaaactctctctttagatatgtgtgcctggtggttgcattgttgatatgtagctttgccgatgcacagcagaaagcgaattataagttagcggaaaagttccgtctgttagaacagaatcctataataaagtattcaacagaagtcaagccaacgtttattaatggtacggactgtttttattattcgtttactacacgtgaaggaaagaagtattattatgtaaatccgaagaaaaaggaaaaacgtcttctgtttgatacggctgaattattgagtaaaattgcagtatataccaagaaagcctattcttcggcagatccatatttgtctttcactttcatgaaggataacgaaacgattcgtattgattttgaccgtggactttatacgtacaatattcatacgaaagcactgaagcagcttaatgagaaaccatcttatggaaatagtgatccgtattggatgaagtattctccagatagtctttattttctttatgccagcaaggataatttgtattttgttgggaatcaaaagaaagggcaagataccattcctgtacaactgacaacggacggtgagccgaattatacatttaaccgtgaagatgagggtaagctggaaggacgcttcggagccgaatctactcattggattccaggtagccatcgtttttatgctgttcgtgaggataacaggaaagtgcgtgatttatggttaatcaattcgttgtctactccatatccgacactgaaaacttataaagccgaactggcaggcgataaacatgtcacccaatatgaattgttgattggagatgtcgatacccgtgaagtgaagaaaatcgatattaatcgctggcctgatcagtatattgacatattgtatatttcaaaggacgggaagcgtttgtatttccaacgttataaccgtccatggaaccagtcggatatttgcgaggtagacgtagaaaccggaaaagtgcgcgtagtgattcatgaagaaaacaaaccatatctcgattatcagatgcgtaatgtttctttcctgaatgacgggaaagaaatccttttccgttccgaacgtaatggttggggacactattacctgtatgacacagcaacgggaaacttaaagaaccaactgaccgatggaatatgggtagctggtccggttaccaagattgatactatcgggcgtaagatgtatttctatggttatggtcgtgagaaaggcattgacccttattattacattctttatgaagctcaactggatcgtccgaatgctgttcgtctgttaactccggagaatgcgtcacatgatgtcagtatctctccgtcttaccgatatatggtagattcttattctactgtttcgcaggaaccggtgaatgtggttcgtaaccggaatggaaaggtgattatgacgttggaaaagcccgatttgcagcctgtctatgagatgggatggaaagcaccggaacgctttaagataaaagctgccgatggagtgaccgatttgtatggcgtgatgtggaaacctgccgactttgactcgacaaaggtttatcctatcatttcgaatgtttatccgggaccgttcttcgaatatgtgccgacacgtttcacgattaatgatgtttataatacccgtttggctcaactggggttcattgtaatcactgtggggcacagaggtggcactccgatgcgcggaaaggcttatcatacctatggatacaacaatatgcgtgattatccgttggcggatgataaatatgctattgagcaactggctgcccgttatccgtttattgatgccaccaaagtcggtatttacggccattccggtggagggtttatgtcggcggctgccatttgtacttatcctgatttctattcggctgctgtttcatcggcaggtaatcatgacaatcgtatttataataaaggctttgttgagattcatttcggtgtagatgagaaggtgaaaacgactaaagatagtttgggagtagaaagtacgatgtatgattatagtgtccgtgtacgtccgaatcaacagttggtaaagaattacaagcacggcttgttgctgtttaccggtgcgatggataaaactgtgaatcctgctaacacattgcgtctggtggatgcattgattaaggctgataaggatctcgaaatgtttgtattgccgaaatgtacacatggattcttcggtgagtctgaggatttcttcgagcataagatgtggcgtcactttgcccgcttgttattgcatgacaactcggctgattctgatgtcgatttgaataaggatatgattaaagatgacaggagaagataagatgaaccggatatttgtatatatagggattatagcaggattgttgctggggggaagcttgtctgttgaggctcaaaagaaaccgttggatatagaagcatgtacatcttggaaacgtattgatgcaccggatatttcaccgacaggcagatgggtgacttaccgtatatcgttgatggaatataatccggctagcaaggaagaaaaaaaactgcatttattcgattcccgtacgcggaaggaaatattgctgaatggcgatatagagcgtctggagttttataataacgaccagggagctttttatcggttggcagactcggcaggagtaatgaaaacatttttgttgtcattgccttcgggagtaaagaccgaatggaaacataaagaggcttttcgtcctgtggaagggaccccttactcaatctctgtaactaatgtgtcgaaagatacggtaaatcatgttccggcttttaacaggctggtggtacgtcatctgaagacagaagttgcttttcatattgacagtatcggctatcatacattatatgacggaggacgttctattcttttcattcgtaaaaagtcagacaggaacgagctatgctatggccctttagctggtccatataagactctttatcagagttctgtaaagagtgaaccctcttcttatagttttaatgaaaaagagatgatcggggagtttagcgtaaatgattctttgtggtatgctttttcattaaagaagccgggttgtaacttgctttttgaccggaaagaaattgttttgcctgatggtatgtctgtcggacgtattgacttgtctaaaagccataattttttgatacttgaacttcgggactcacagcagatttcccgtaggagggaagaatcggagaagaaaccggacaagagttttgaattagagttgtggacgtggaacgaaatggaagttccgactttacaaaggggcggacgttataggcaggataagtcggtgacgtatatttatgatattttttctaagaagctcacagaagttgctccatttaccgtagatttactcttaccatcgggagcagagaatttgaactatgtgctttacacagatgaatctccttataagatgcagcgtgagtggttggatcggttgccgttcgatatatattcagtgaatgtgcatacaggtgcaaaacggttgatcggacgtagttatcgtacagctcccaaatggtcggtaaatggcaagtgggcagtaatgtatgatccgattgctcaagtctggaataagtttgatggtgctaccggtaaggttgttaatatatctgatgctatcggttatccaatgttcatggaaagttatgataaaccggctcctgctcccgcttatggaatagcagggtggacggctgacgggaataatgtgtttctgtacgatgcatatgactggtggaagactgatttgacaggagaacgtcagccggagtgcctgactaaaggatatggtcgcaagcatggcaaatctattcgtaaaatgacgagtaatatagataaggatgtttttcagaaagacgaaaaagtcatagttagcctttgggataaagacacgatggatgagggtgtctatcagcttgatatgaaaggccgtctgagaaaattgatggaggggaattatgtatatactatacatcgtttttctgacaatcatgagtattgcgtttggaatcgtcagaatgtatcggaatttagggatttgtggtggagtaagtccgatttctccaatcccgttaaagtgacgaatgcgaatcctcaacaagcagattataaatggggtacagttaaactgataaagtggactaattatgagaataaggaaaataaggggttgctttatcttccggaagattatgatcctcaaaaagaatatccggcgttggtgcagttttatgaaactcattccggtgagttgaatatttatcatgcacctttgttgagtagtgcgttaggggatcctatgtattttgccagcaatggttatattgtgtttatgccggatgtgcatttcacggttgggactcccggtcagagttgttatgatgctgttgtgagtggaacgaagtatctgatagagcaggggatagcacatcccgggaaaataggcttacagggacatagctggtctggctatcaaacatcatatttggtgacaaagacagatcttttcacttgtgccaatatagcggctccaattacggatatggtgaccggatatttgggaattcgtaatggaagcggtctgccacgatattttatgtacgaggaaacacaaagtcgtatgggaaagactttatgggaggcaaaagataagtatctggcaagttcagtaattttggaggctgataagatacatacacctttgttgatattacataatgatgaggatgaggctgttgcatatgaacaaggacgtgctctttatttggctatgcgtcgcttacaacgtcctgcatggttgttgaattacaaaggtgaaggacatttcgtactgggaagaggtgcacagaaagactggacaatccggatgatgcagttctttgactattacctgaaaggaacaaaagaaccacgttggatgaaggaaggtattcatctgcgagagcgtggaattgatcagaaatacgatttactaaaaaaataaatattgatttaagatgaaaaaattattgattacggctatggctctgtcttgtttcgctttaagctacggacagaagaaagtagaaaaacagattatcggaaaatggtgcaatccttatacatacaagtctacgggtgagttgaaaggatttgagttcaagaaaggtggtaagtgttctgctatcaatattccgtctttagatttgaaaacgtggaaagtggataatggttatctgattgtggaaggattcagcaaggaagatgatggaaaggttgaggtgtacaaaactcgtgagcgtatcggctacctgacatcggattcattgcagttgatagtgaacgaaggaactcctcgtttggctttcctgtacctaaatacaaaatcaattaaggaactggttactcctgaagtgaagtaactccaaactattaataaattgactaaatctctctcttaataatttagtgttaattagcataagctaatggagtgcctcggcgtagtgattacgccggggtttcttttttatgaaaggcgaattgaaaagcagtgtacgaattgaaagcaatgagcgcttatcgcaacatccccaatgccttattctcagctgcttccataacttcccgttctccgggacctttatcattaatgccgcacaaatgaagaattccgtggataatcacacgatgtagttcgtcttcgtatgaagcaccaaactgttccgcattggtgcgtatcgtatccaggctgatgaataagtcacctgatagacgatcgccttcacaataatcgaaagtaataatgtccgtgtagtagtcatgttgcagatactgacggtttacctccagaattttttcgtccgagcagaagatataagcgatttcaccgagtctttttccgtaagaagcagctacggtctttatccattccgtagtctcacgtttcttgatatcaggcatttttacgccttctgtttgataagttacagccatagttgaatgttatgatttaaaagaaaaataaataactgattaagatagcggctatgatacccgaaaagtcagctatcagaccgcaagtcactgcattacgagttttggtaattcctacactgccgaaataaacggccagaatgtagaatgtggtatctgaagctccgcgtactacgcaactcatacgccctacaaacgaatccggtcccagttctttcatcgtatcaatcatcaatccgttggcaccgctaccgctaagcgatttcatcaatgcagtaggcagtgcccctacaaagcttgtatcaactccgcatgagcctactatgtagccaatgcctcccactagaaaatccatagctcccgaagtgcggaacacggcgattcctacaaggaaagcaaccagatagggtatgatacgtacagctgtcgtaaatccttctttagctccctctacaaacgaatcgtatacattgatttttttcctgactcccgtcagaataaacaggataatgacactgaacagcagaatattcgctatcaatgtagaataagtacccatatcctctcgtgaaacgcttagaaacagataaatcaatcccgaaaagaaaagacagataacacccattaaaatgagaataggcttattgattaagtttatcttttgagcgatactgactgctatgactcctactaaagttgaaatgaaagtacttagcaggatagggataaatacatccgtaggctgtgcagcccccatttgtgcacgatacaccatgatactgattggaatgatgataaggccggatgtattaatcaccaaaaacataatcatcggattggaagccgtatccttattcggattcagttcttgcagttctttcatcgctttcagtcccagcggggtggcggcattgtccaaaccgagcatgttggcagacatattcataaagatggagcctaacaccggatgccctttaggaatgtccggaaacaggcggcaaagcaccggactaagaaagtgggccagcgcattaatcaatccgctgttctcgccgattttcatgatgcccaaccaaagggccagtacacccgtaagtcctagcgatatctcgaatgccgttttggaggagtcgaatgtagagttcatgatagccgtaaatatccccgtatctcccaaaacaatcacttttataagagcgatgataaaggctatgacgaaaaatcctatccaaatgtaatttagaaccatagttgataacgtgtatatagatagtgcaaaagtagttattacgtttcaaataaactaaatcttcgtctttcttatactgaaaatgaatgtaaatctctatctttgtctcctactttcaagaaataaatggaacaggaagattttaacatacgcgaacatcagcttacttcaaaagaacgggatttcgagaatgcactccgtccgttaagctttgaagactttagcgggcaggacaaggtggtggaaaaccttcgcatttttgtgaaggcggcacgtctgcgtggcgaagcactcgaccatgtgctgttgcacggccctcccggattaggaaaaacaactctttcgaatattattgctaacgaattaggagttggctttaaagtcacttccggtccggtactcgataaaccgggtgatctggcaggagtgttaaccagtctcgaaccgaacgatgtactttttatcgatgaaattcatcggttgtcgcctgtggtggaggaatatctttattcggccatggaagattaccgcatcgatattatgatcgataagggaccttcggcacgcagcatccagatagatttgaatcctttcacgctggttggtgcaaccacacgtagcggtctgctgacggctccgcttcgtgcacgtttcggtattaatcttcatttggagtactatgatgatgatattttgagcaatatcattcgtcgttctgcgtccatactggatgtgccttgttcggtacgtgcagcatcggagatcgcttcccgtagccgcggaacgccccgtattgccaatgccttgctccgtcgggtacgtgattttgcgcaagtgaaaggctccggttctatcgatacggagatcgcccagtttgcattggaagcactgaatattgataagtacggcctggatgagatagacaacaagatactttgcaccattatagacaaatttaaaggtggtccggtaggtatcactaccattgccacggctttgggagaagatgcgggaaccattgaggaagtttacgaacctttcctgataaaagaaggatttatgaagcgtactccccgtggacgtgaggtgaccgaacttgcctataaacatttgggaagaagtctttataacagtcaaaaaacgctgtttaatgactaacataaagcgtcatgtgacaagtggtattaacggtataaaagaactttataaagcatagttggatgatgaagcaatggactactttacttgtttttctctttttgagcttgtctttatcggctcaacaggaatatgggagggatatttttgtctcttctaaaggagactctttaccttatcggatgattcatcccgaatcggtgaagccaggtgaaaagtatccgctcgtactgtttctgcatggagccggcgaacggggaaatgataatgagaaacagttgactcatggtggacagatgtttcttaatccggtcaatcaagagaagtatcccgctttcgttctaattccacagtgtccgacagacggttactgggcttatacaggacgtccgaagtcgcttatccctacagaaatgccagtgggacaagagatcagtcctatattgcaaacgcttaaacagttgctcgactcttatctggtaatgcccgaagtggacacacaacgggtttatattatcggtctttcaatgggagcgatgggaacgtatgatttagtcgtgcgttatccggagatttttgcagctgcagttcctatttgcggtacagtcaatccaagtcggctatcggttgccaaggatgtgaaatttcgtatctttcacggagatgcggacgatgtagttccggtgaaaggttctcgcgaagcgtataaagcactgaaagctgccggtgcagatgtggaatatattgaattccccggttgcaatcatgggagctggaatccggctttcaattatcccggatttatggattggttgttcaaacaaaagaagaaacgttgaaccaatctaaatgataattactaataaaacatggctggactaaaatcattagctaaagatacggcaatttatgggttgagtagtattgtcggacggttccttaactacatgctggtgcctttgtacacagcggtattgccagcttccaccggaggttatggagttgtttcaaacgtatatgcgtttacagccctgatgcttgtactgcttacgttcggtatggaaacgggattcttccgttttgccaacaaatcgggagaagacccgatgaaagtatatgccaactccttgttatcggtaggaggggtatctttgatttttgttttcctttgcttgttattcctgcaacctatttccaatttactggattatggcgattatccggagtttatagcgatgatggctgttgtggtagctttagactctttccaatgcattccttttgcctatttacggtataaaaagcggcctattaagtttgctgctattaaactgctctctatcgttggtggcatcggtttgaatttatttttcctattggtgtgcccgtggctgaatgtacattgtccgtcaacgatctcctggttttatgatccggattatttagtgggatatatctttattagcaacctgattatttcggttgtccagatgttcttctttattccggaactgacaggttttgcttataagttggacaaggtattgctgaaacgaatggtcgtatattctttcccggtattaatcttaggtttggtaggtattctaaatcagactgtggataagatgatctatccgtttctttttgaagaccggcaggaagggttggtgcaattgggtatctatgcagcaaccagtaagattgcgatggtgatggcaatgtttacgcaagctttccgttatgcttacgaaccgtttgtctttggcaaagaccgagaaggagacaaccggaagatgtatgccgctgcgatgaagtattttcttatattttccttgctggctttccttgctgtcatgttctacctcgacttgctgcgttatctggtggcaaggggttactgggaaggcctgggggtagtagctattgtaatgcttgcagagatctgtaaagggatctatttcaacctttccttttggtataaactgacggataagacctattggggagcctacttctcggtgattggttgtgttattattgtcgtattgaacatcctgtttgtgccggtttacggttatcttgcttcggcatgggcttctgttgcaggctatgcagtcatcttgctgctatcctactggataggacagaaagaatacccgattcattatgacttgaagagcctgggactttatgttctgctggcagcggtactttacattattggagagcaggttcctatccctaatatagtgctccgtctcgctttccgtaccgtactcttattgctatttatagcttatattatcaagaaggatttaccattgagtcagattcctgttattaatcgatttataaagaagaaataactatgaagacagatgaacgtaataagtttgctatcaagtcctttctgggagaatatctggacttgaggaaagataaggataacgaactggccacagtggattctatccgtaagggggtagagttcaaaggtgccaatttatggattctgatctttgccatattcatggcatcactcggattgaatgtgaactccactgccgttattatcggtgccatgttgatttctccattgatgggacctattatgggagtaggactgtctgtcggactgaatgactttgaattaatgaaacgctctttgaagagctttctcataacgactgctttcagtgtgactacggcaacaatctttttccttcttgcccctattgccggttcacagtcagagttgctggcacgtacatcgcccactatttatgatgtattcatcgcgctttttggtggtttggcaggtgtcgtggctctctctaccaaggaaaaaggaaatgtgattccaggtgttgccattgctactgcattgatgccgccgctttgtacggcaggttacggactggcttccggtaatctcatttatttcctgggtgctttttatctttactttatcaactctgtttttatcagcctggctactttcctcggtgttcgtgtgatgcatttccaacggaaagagtttgtggataaaacccgtgagaagaccgtacgtaaatacattgttctgattgtagtgcttaccatgtgccctgcagtttatctgacatttggaattataaagagcactttctatgaagcagcagccaatcgttttataaacgatcagttgagctttgagaatacgcaggtacttgataagaaaattagctatgaccataaagaagtacgggttgttttgattggtcctgaagtgcctgacgcttcgatatctattgctcgtagcaagttgaaagagtataagctggaagatacgaaactggttgtattacaggggatgaacaatgaggcggtagatgtatcttctatccgtgccatggtcatggaagacttctataaaaacagtgagcaacggcttcaacaacaggcggtgaaaatttcccaactggagacaacactggagcaatacagaacgtacgatgctatgagtcgtacattagtacccgaattgaaggtactttatccttccatcacaactctttccatcgctcactcgctcgaagtgcgggtcgattcgatgaagacggatacggtaacattggctgtccttaaattcgccagacatccgtctgttgctgaaaaagagaaaatcagcgaatggctgaaagcccgcgtaggaacgaagaagttgaggctgattacagaataatgaatctaaaaataataatatgaagttcagactaaccgtcttgatagtcttttctctctgtctgtcgaatgtatttgccgatgagggaatgtggttgttgggaaatctccgaaagaataaacagactgaccgggtaatgaaagaacttggtttgcagatgcctgtgaataaaatatatgatccgaagaaaccatgtctggcagatgctgttgtcagttttggaggcttctgttcaggagtggtggtttccgaagacggtctggtgtttaccaatcatcattgtggctttagcagtattcagcaacattcttcagtggagcatgattacctgaaagatggcttctttgcacgtagtcttgaggaagaactgccgaatccggagttgtatgttcgtttcctgcttcgtacggaagatgttactaaacgcgtattgtctgccgcccggcatgctaaaacggaaacagaacgccgtgtagctgttgattcgattatgaatgtaatcagtatggaagtctccgaaaaggattctacattgactggtattgtagatgcttattatgcagggaatgaattctggctatctgtttatcgtgattataatgatgtccgcctggtttttgcacctccttcttctgtcgggaagttcggatgggatacggataattggatgtggccgcgtcatacgggcgatttcagcgtatttcgtatctatgctaatgccaagaatggtccggcggattattctcctgaaaacgtcccttatcatcccgaatatgtagcacccatttctttggatggatacaaagaaggttctttctgcatgacgcttggctatccgggcagtacggaacgttacctttcctcgtatggtatcgaagagatgatgaatggaatcaatcaggcaatgattgatgtacggggagtgaaacaaaccatctggaaacgggagatggaccgtcgtccggatattcgcattaagtatgcttcaaaatacgatgaaagctccaattattggaagaatagcatcggaacgaataaagccatcaagcatttgaaagtgttggaaaagaagcgggtggctgaagcagagcttcgtaactggattcagtctcatccggaagagagagagaaactgattcgtttattttcttctttagagttgagttatagtaatcgccgtgaaaccaatcgtgcgttggcttatttcggtgaatcgtttataaatggtcccgagttagtgcagctcgctcttgaaattctcaatttcgactttgaggcggaagagaagttggtgataacccgcatgaaaaagttactggagaagtatgataatctcgatctttccattgataaggaggtttttgctgccatgctcaaagagtatcagtcgaaagtggataaaaagtttctgcctgctatgtatgagaagatagatacgctctacaacgggaatattcagacctatgtagactctttgtatgcaacttccaatataacgtctcctaagggcttaaaacgttttctggagcgagatactacatataatctcatagaggatccggctgtttccttgagtctggatttgattgtgaagtattatgagatgaatcaaagcatttccgaggcttccgagcagatagaggagggggagcgtttattcaatgcagccatgcgccgtatgtatgctgatcgtaatttttatccggatgccaactctaccatgcggcttagtttcggaacggttggaggatatactccttttgatggggccacttatgattattacacaaccgtgaaaggcatttttgagaaagtgaaggaacatgcgggtgatattgactttgccgttcagccggagttgttgagtttgctttcttccggtgattttggaagatatgccaatgcgcagggagatatgaatgtttgttttatctccaacaatgacattacaggcggtaattccggcagtgccatgtttaatgccaaaggagaattactaggcttggcttttgatggcaactgggaagcaatgagcagtgatatcgtattcgaaccagatttgcagcgttgcatcggggtagatgtgcggtatatgctctttatcatagagaaatacggtaaggcagcccatcttattcaggaattaaaaatgggtcgatgaagtaaatattccgatgaaaccgcattttttatcgttttaatataataacgattacggcagcgataatcagtgcaatgcctataccaatgcttgtggtgaaggcttccccgaaaagaaagatacctacacatacagcagttaccggctccatagctcccaacacagaggtgagtgtggagccgatgctttttacggctcttactagagcaagattagaaactacggtagggattaaagctaatagaatcaagttgccggcagtatgccattcgctgatgggttgaagctggctgatggtttccgttccgataaaaaggagaatacctccgaataggaatacatagaaagtaagcagtagccctttcatctgtccaatctttaattggctcattgtgacgagataaagcgcatatccgagtgccgacagaagaacaatgaaaagtcccaggaaagaaaagctccccgtttttgtatctccgccggataagaaataaactcctgccactgcggatgcaatggcagcgatccgccagccggacttcttttctttaaaaaagagcatcatgattaacgtggtaagcaccggatacatgaaatgaatagtggtggcaactccgctagccataaacttatatccccagaacaggaatacggcagacattaaataaagaagcgcaagaagaaacagggaaggaatgtcctgcctcttgatgcgaaatgattgaccattcaccaataagattccgcctaacgccagacaggcaaacaggaaacgatagaaaagtatcgattcaaattgcatccctgcttgcatggcaggaatggtaaatagagggataagtccaaaagaagccgatgaaagcagcccatatagtaaaccattaactttattcatagtcaagtatatattcgggccgcaaagatatagcttttttgaggcaagtagataaagcgtccatacaatatttttcgtaaattagcacgcgatgtaaatatggcatccgattgaaagaaaatacaaactaatttttggataaaatgaaacgattgacactattaccgggattactatttttaatgctgcaagcagcattttcacaagagtcaggcagctgtaaaccagtgaacctggtttgtgattatttggtgaatcccttgggaatagataatcctgctccccggttatcatggatgctgaatgatgctcgaaaaggagcacggcaaacagcctgtcaagtcatcgtagacaaagactctcttgaattgattgcagggaagggaactatctgggattcgggcaaaaaggactccgaacagattctgattacctattccggacaggaacttcgtccttttaccaagtattattggagagtgaatgtatgggataaggatggagtgaaatcttcttcggatattaatagtttcgaaacgggcatgatggggatggaatactggcaaggggcttggattagcgataacaaagatattaattaccgtcctgctccctatttccggaaagtgtttgatgcacgaaagaagatatggtcggcaagggcatatattgccgtagcaggtttgtatgaactgtatatcaatggtgagaagattggaaaccaccggctggacccgttatatacccggtttgacaggcgtaatttctacgttacttatgatattacttcccaaatacagaaagggaaaaatgcgattggtgtgttgctgggcaatggatggtataatcatcagtcaatggccgtgtgggactttcatcgtgcaccttggcgtaaccgtcctgctttctgtatggatgtgcggattacttatgaggatggttctgttgaagtcgtttctacggagcgggactggaaaacttcatccggcgcattgatctttaatagcatttatacagccgagcattacgacgcccgtttggaacagaaaggctggaataccgtgaactttgacgattctaaatggaatggagtaggatatagggctgttccttcacagaatgtggtgtcacaacaagtgcagccgattcgtgcagtagaaacgatccccgtaaaaacctggaagaaacttaatgacacaacgtatgtattcgattttgcccgcaatatggcaggagtcacccgcattaaagtgtccggggaagagggaactgtagtgagactgaaacatggtgagcggttgtatgacaacggacgagtgaatacgtcaaatattgatgtgtatcaccgcccggtagacaactccgatccttttcaaacggacatcctcgttttgagtggaaagggagaggatgaatttatggcacgattcaattataaaggtttcagatacgtggaagtaacaagcactaacccccttgtattgaatgagaatagtctgactgcctactttgtgcatagtgatgttccgcagaaagggacgattcatacttcgaacgcacttatcaaccgtctttggtgggcaacaaataatgcctatttgtccaacttgatggggtatcctaccgactgcccccagcgtgaaaagaacggatggacaggcgacggtcattttgctattgaaacggcattatacaattatgacggtatcactgtttatgagaaatggcttgccgaccatagagacgagcaacagcccaatggtgtacttcccgatataattcctacaggaggctggggatatggcacggataatggactggattggacaagcactatcgctattattccatggaacatttatatgttttatggcgatcataaactgttggcagactgttatgaaaatataaggcggtatgtagactatgtggatcgcaccagtccgaccggattgacctcatggggaagaggagactgggtgcctgttaaatcacattcttccaaggaactgacctcttctgtctatttctatgtggacaccaaaatacttgccaatgccgcaaagatgtttaataaaacggaagactataaatattattctgctcttgccaataagataaagaacgcgattaatgacaagtttctgaatagagaaacgggcatttatggtagcggcgttcagacggaacaaagcgttcctttgcaatggggcattgttcccgaagagttgaagagaaaagtagcccggaatctggcaaaacaggtggaagcagccggctttcatttggatgtaggtgtgttgggggcaaaagctatattgaatgcgttaagtgagaacggtgaagctgaaacggcttataaattagctgcacaagacacttatccatcatggggctgctggattgccaatggtgctaccacattactggagaactgggatttgaatgccacacgtgacatatcggacaatcacatgatgttcggtgaaattggcggatggttctataaaggattaggtgggatcttccctgaccccgaaaatcccggattcaaacatattcttcttcggcctaatttccccagtggattaaatgagttcgaagccagatatcaatcaccttatggggaaatctgctctaaatgggaacgtaaaaagaaccgtattgtctatcatgtaactgttccggcaaatagcactgctaccttttatgcacccgacaatgtgaaaggagagcgtgcagtaaatttggaagcaggaaaacatatcttggaattacctataaagagagctgtttattgaatgtctttcgattggtaatcctggttgctgtttacccagatgtaaaaaactgcttctacaccattgaaacggatgaatatatctctccccttccatgaatcgggcagagtgaaatccttccgatagctacctaccggattgggcatggaagcgaaagtataatctgccggacgaggctggatgacattgggccactgcactcctttgctataatcgcagaatggatagatcacgttacaatagagaggtttgtcccaatttcgtgcttttgtatagctgctttataactaatagatggagtgttttgaaataagaacttgacaaacgactttttattttgtatctttgtgatcagaaaagaaacttattgattggaaattatgtgtatgaatagtataatattagaacagagttgccgacgatttacctctctttagaagaagaggaaatttattatatactaaaggttgcagacttttgatgagtttgcaaccttttttgttgtataaaattgaattgtttgcagtagatatacttcttatcgtttttaataaataggaataccgtttattaaaaacgataagaaagtttattagaaacacaaaagtagattctgtatgaacagttgtcttttttcaataagatagaatagggataatgttgttccttctcattagaatgtcaagatggtaattagttgtaacataaagacctctgactaataatgtacaaatctacggattatgcttgcttcatatttatttcttcttaggttttctacgtgcccatccttcttcgctgaagtcaggttctttatctttaaaaaactcttgccagtcatctttctttttcggaccgcgagcatcagagtatcctcgctcagcacgactaggcttatctttttttgttgactttgagtcttttgcagaagcatctttcggttttctatccttattttcatagcgcggtgcacgttcgtcgcttttgccgccgaatcgtttacctcccttgcgctcatttgaaccgttttcacgtccttttccgttttcttcaccggcaccggcaatctcaacaactaccttgcgtccgttccatttagccctattcagcgccttgattacatttgtcgcttccttttccggcacttcaaagaaagaatagttctgcattaggtcaatacgtcccaactcgatacgtcctcttgtgttactatttagtagtccgataagatcgctagggaagaaactgtctgttttacccaaattgataaacaggcggttaaagcccggtgcagcttggcggcttcttttttcgaaaccaccttctttgcggtcaccccgtccggtacgttctcctctgatgtcagtcggtacttctatttctgcacggttgcgataatactcggcgaaacggttgaattcgtgagaaaccattcgtttaatcaggtcctctttgctcaaccattccagtttacgatagatttccggcataaagtcagcaatctcttcctcgtttacttttactttttcgagatcatcaataaccttaatcagctgcttctgacagattcctgctgctgttggcatttttccgacaatgaattttttgctgataatccgttcaatttctctcatctttcctttttcacggaggttgatgatggcaatggaagttcctgtttttccggcacgtcctgtacgtccgctgcgatgtgtataactctctgtatcgtctggtaatccgtaattgataacatgcgtcagatcgtctacatcaagtccgcgggcagccacgtcagttgccacgagcagttgcaagttgcggatgcggaatttctgcataacagcatcccgttgtgcttgagaaagctcaccatgcaaagaatcggcattgtagccttcttgcattaatttgtctgcaatttcctgagtctctttacgggtacggcagaaaatgataccgtatatttgtgggtagtaatcgacgatacgctttaaagcttcgtatttgtctttagcctgtacggtataaacaacgtgtttaacgttgttggtactttcattcttacggccaatagtgatttctttcgcattgcgcaggtaatttttggaaatgcgtgcgatttccggactcattgttgcggaaaacaatagagtgttgcgttcctgcggtacatcagccagaatggcgttgatgctttctgtgaaccccatattaagcatttcgtccgcttcatccattactacattgtggatggtagacaaggaaacggttttgcgttccatcaggtccaacaggcgtccgggtgtagctacaatgatgtgtactcctcgtttgaggctgcgtatctggctgtcaatagaagaaccaccatatacaggtaatacttttagtccatcaatgtatttggaatagtcgttcaaatctcctgctatctggagacagagctcgcgggtagggcagaggataagcgattgtggaattctgttttttacgtcaacttgttggagcaagggcaaaccgaatgcggctgttttacctgttcctgtctgtgcaagagctactacatcattattttctcctaaaaggtacggaatcacttcttcttgtaccggcatgggattctcgtatcccatttcttcaattgctctacgtatctccggagaaacgccaagctcttcaaatgtcttcattaaatctctgtatatcttttatttcggctgcaaagatagttaatttagttgataatgaatgattgatagtagataattattatagacgccaccctattttatcacttatcaactattaattatcagttagtaagatgctgcgtaactgttcaatttcttctgcagaaagtccgattccctttttcagataggtctgtacgctcccgtattcagcctcaatctgttctttggcagcgttcaggaaatcttcttttgcagagtagatggttgtaatggcttcttgcgaattgaccgataacttatatgcatattgagaagctttgggaatattaaaatagtcattactcaaacgatagtcttccataatgacgtcttcgttgactccaagagcggcaagcaataaggcggaaacgacccctgtacgccctttcccggatgtacaatgaatcacaaccggataatgagtacggtcgagaaggacggtgaacagctttttgaattccttttggtagtttataactaattcccgattcatttgttctaccaaacgataaatagtgtcactttttatcttctcttcctgaattccttgcagaatttcttccatgttccctgtgagaatagggatatgtatgatattaaattcatcatcatgcaattgcgggtagttgtggcgttcattttcagaacgtaagtctataatcgtccgtacgcccatattcttgagttcccggcgtgagcagggaggaatactgtctatttgtgcggaacggtatatcattccccagcgaagagattttccggtaccagcagattcgtatcctcctaaatcgcggaaattctgtatgccggggatgttaatgttgcgggtggccactttaacccggtatttgttattaaataccatcaagtagtaataacgttgagacggatcgttggttacgattgtcattttaccactggaaatgtttgccattgcaatgggagaatcttccggaatagcttcaggagaagtagaggtgtatacttttacctgtccttttaataccggtgctgtttcccatttgataatacagtttcctacgttattttcttcacataccacagatatagcaggtgatgtgccagaacatgatgggagcactaataaaacagtaagccagcttaacaggtttctatacatagtttctttgtcttgaatcgtatactgcaaagataagaattacccgaagatgtggtaattcctttgctataattagccaaagttaatagtaatttacgtgttaaaaaagggcgcttcttcgttatagaagagcgccctgaatgagaagtaacctaagtttgctttattgaatattgttcaatagatctatttttccttcgttgaccaactttaaaatgagctcaccaaataaggtgttttgccatgcaaaccaggcgcgtgtgaagtttttagggtcatccttatggaaagattcgtgcatgaatcctgttcctgcatctgtatccatcagcatttttatgcaagacttaatttcctggtcgtcctgactggtgaatgccttcatcatgatactcataggccatatcatatcataaccgatgtgaggtcctccaataccttctcctgcctttcctttgaagaagtaggggttgtctttgctccatacaaaacgacgtgtgttttgataaataggatcgttgatgtctacatctcccagataaggcattgccagcaggcttggtacgttggcgtcgtccattaagagatgatttccgaatccgtctacttcaaaagcatagattgtaccatatttaggatgattgtaagttgcatattcttttaatgcggtttctacttcttgtgccaaatctgtgcattgtttcgccagactggtgtttttgtttacaacattcagaatttccgcagctttctttagagaagaaacagcgaagaaattagacggtacgaggaactgtaaagtggttgcatcgtcagacggacggaaagctgaaacaatgagtccgacaggatttacaggagcacctagaccgttattgtttaatgtgtcgagtgcgcgttctgtcttacgctggaatttatagggacccactccctctttgcgctgttgttccttgaaagttgtcagtatgttggcgatagcctgtatccattcattatcaaagatgcttgcatcaccggtttctttccaatattgataggccagacgtaatggataacataaagaatctatttcccatttacgttcgtgcagttccggtttcatatcggtcaggtcggacatccaatctcctcccacagccccatcattgaaagcattggcgtatggatcgatatttatacatttaaattgtctgcgtatcactccttcgagcattttcttcaattccgggtctttattcgctaattgtatataaggccaaacctgtgctcctgagtcacgtaaccacatggcatggatatctcctgtgtagacgaaagtatcaggcttaccgtctgttgtacggtaatgaactgttgtctcaagggtatttggaaaacaattctcgaacatccatgccaatttttgattagtaagtagctttttcaccctgatgatttctgcttccacggcttttgatttaaaaagccgcttgtttacgggtggacgattacttttataagcggcaatttcagctgcttgattgaccacattggtatgatccttagccaggataagttctgtagctttggcaggacctcccattaatagggtggtcgtgatgatacatattccgatatttcttttcttcatatctctattgtttttaagagggttattaaaagtgattattgcaaatcgattccgcctagtcttccatacatttctatgaaagcagcttgtgtcaagagccattttttctcgtttttatctgtgccgctccaatctgtctggaacaagccccgttcatctctggcatgatgccatgcgtaatcaagacttttctggaaatcggttagataagtcttgttatggtctatctgataaagttcaataaagcctctaagcataacggctgtgaaccaaatatttccttttttcagtaattggaatgtttgtccgtctggagaggtgaactgagtgaagaagtgcttgtgacacgcttctgctatattttgtgcatcttccagataacttttctgtttggtaatttgatagagtagggcagctgcctgcatcatttgtccactgttataggcaaatttggcacgaccgattttcttgttgagtgagatgttgtcaaagtatagatgatcttttgagtcttccaggttctttttagtccattcgtataactcttttccttcttttaaataggcatcatcttgagtagcttgaaatagtttgagagcgaatacggctcccggtgcattagaacaagtatttttagattccttcttttgttcgcaccagtagattcctccgccgagtacgtcatctttaccactaaggataaacttccatattagtttagctttctccagataagcttgttttcctgtcatacgataagaatcggtaaaatcgatacctaaccagacgttgtcatcataaaaacgatcggagagaggttgactgctgatataagatgagtaagcgaatggtttccttcgtgtgtcgaaatactcttctaatccgggtagtactttattttccaaaagttttttatactttttattttcagtgctctccagtagtgcatttactgcagagaatgtacccgaatacggccaaaggtaggaatattcattgcgtctttttgcttgttcttctgatgccagataagttgccttattgtcctggtcaaaaggataattctcacgtaacagacaagtgttggttgctgcatagttttggtaaagagcatccaaagtttgctgtgctttttctatgttaggatttgcgtttgcaatggtgaaagcacaaataacattaagtaataggccgttcataattttttatttaagtggtgtttatataaatagtaatttgaatgagttcgcaggttttattgtgactctacaaaaataccttatttcggttactttttaaatggggagtgagcagattgtaaatgattgtttggggtatgttgttgataatcagagagtctttgatcggagagtctctgataaatgtaaatgatgctgtatgattaatacactgttattcccggatttgttgtccgattcgagctactttttcttcaaattcattccggtctccatttgctttgatccgcatttttgagcggtaattatagatggtcgataatgaatactgtaagaaatgagctattttcacactgtctgtaattccaagtcggataagtgcgaagatccgtaactcgggtgttaagagtttgccgggtcctggaatgattgcattttccggtaaaagcaatgcgttaaaatcttcgacgaaattcggaaagagattcaggattgctttgtcgaagttattataaaattcagccagatcttcttctgtattgagagaggagtggaggaaagaggttactttctttatatcttcacttttggctattttgagtgctcttttcttaaaattggcaattttactgatataactggtatattgttccatatacagccctacatattcttctttgattttattgttatctgccaatattgagttcatttgttgtatttcgtaaagatgataagacaaactctcattagcttgttccactttacctttttgttttttcagttgtacggacaggatgaatagcagaatgcagacaatgcataatgcaatgagcaatgccgttatgatgataaatttatgtttctccttttcttgaaatgccttatctatgaaaagatacatatctgaggcttcgatggtgttaattctcgcattgcataggatagcgtcctccattgcatttttcatatatttagatgcccggtctatatccccactctcaaagatcagcttggctaatatttttaaagagagattttctctagctccatttaatacatcagaaatggcggatattgcgaaatatttaatcgtattttcacggtcatttttaccttgataggcagatgccagagaatatgctatgattccggcatttcttgaatagggtgtataactttgataagtgctgtccagtatatgaatagcatcatcatactttttatggaaaagaagagtcggtgcagttataaaagctcgtacgtttgatgggacttctttgcattggagcagcgaatcgcgatatatttgtgctatcagatcattttcttgtgaatcgtcctcgttggaagcaaaagctttctggtgattatagatcgtgacttgtccgagaaaatattcagctttgagtttaggagatagttgcttttgttgcatcgaattggtaattgccaaagcttctttgaaaaagcccatcgaagataatattcttgaataatccagtttagcttcaattaaaagttctttgtcattactttcttgagcgaacctgttcatgtggatggcataggctaaagcggaatctttttggaaagatgaatactcaaaacaaagagactgtgctgtcccaactttctttcgaatatccctggattgtcttaatattattttcaggctgtctatctgtctttgcttttgttgggtataactagctttgttttgtagagatttatctaatacttttaacaatgtttttacttcatcgtttgcttttgctggtaaactgatgaagataaagattatcaatagaggtaaaataaatcttttcatatattaagtaagattgcttattgaatatggttgtttgcaaagataaggaaatccatattaagttaaggttgacagattaacttaatatggattttatgaaaatagggatttcgctggatgaattacttatatccaaatccttatttgtaatatcacttgtatttttgtgcaaactccaccgaaaccgaattgctgaaacttcggcaaacttcagctgcgaagtctttcccgcattggattattttatcccagatctcttcattcaagttatttagatcgcggtatcggacatcgtatttgagtaatccgtagatcagccctgcattgaagttatcaccagctccaatagtactgactgcttgtaatggttctatcggataatctttattgaccagattagtgcgtaacgctaccttttccgcacctgcagtacagatgaaccggggacagtagaatttgattttatccttgtaaatcttgtctatatcctgcatgttatacatatatagaaaatcctctaaagaaccgcgtacaatatccgcatattccagattttcaataatggtcggagccagtttcatggcttcattcttgtgtgaagaacggaaattcgggtcataatagatgatggctttcttttcacgtgcctgatctagtaattcgagaatcttctccctcagaaccggattcagtgcgtaataagaacccaccatgacaatgtcgtcttcctctagtttcggaaacagaacatccagacgttgcttcgggtagtctttgtagaagatatattcagcatcactctgctcgttcaggaaagctaaggatacgggcgattttccatccgggaatacatttacatgatcggttgggatatgattctcacgcataaactgcaggataatattgcctacacggtcattcccggtttcactgatgaagccgacgtttattcccattcgtcccaatgagacaataccgttgaatacagaacctcccggtacggcggcagaaggctggtcacctcgaaagatgatatcgaggatggtctctccgataccgattacttttcgcatagtgatcttgatttttctcccagataaccgccgtggtgacgttttgaatattcagcgatagtaaatcctgtttccttcatggtttgtactaccaatatatctccgatcactgtcatggcagtagtggatgtagtaggagtcatccctaacacacagacttctgcaggcttgccggtacttagacagacatccgattcttttgccagcggactatccggatttccggtgataacgataaacttcagatccgggtccagattatgggccaggcgggttaattccacaatctcacgtgtcttgccagagttagagatcagcaggagtagatcgtttttttgtaagatacccaaatccccgtgttgcgcctcgctaggatgcagaaagacggatggaataccggtggaacagaaagtcgtagcaatgttcatagcaatctgcccggcttttcccataccggaagttaccagttttccctttttctggtgtatttgttctacaatcagtttcaccgctttttcataagcgtctgttacggggatgttgagcacagcttgtgcttcctgttgcaaaagttgtttgatggagtctatcatataggattagtttattttttcttttaattcatttaatgtgtttgctacttcgtaataggttgagaaaggctgtcgttcaaaacctttgtcctccagggtgtggagtgcttttaatagctcatcgtaaaaaccatattcattgtagaaaatgaccttcttccgatgatatccgatagaggcagcggctattacgtggaaaatctcatcaagagtaccgacgcctccggggagtgcaaccaatacctccgacttctccgttatgatatctttgcggtcactcaagttacgggtatgaatttcttcatctaacagagtgcttaccttgccattctcttccagtttggcaggaactactccaataaccttaccaccattttctttcacggcacgagctatgcattccattaatccgaggctggctcctccatatatcaaggttttgcctgtctgccccatccatttgcctatttggctggcgctttcgaagtacattttgtcaatgttatcggaggcggaacagaatattcctatcttttccatatacgttgttgctgttatagtccacaaatatctgcaattttctataaacagcaataagttttattgtatttttgtggcattaattcaataaggaagtataaaacgatgcaaggtaacgaatatacattgccaaatggcctgcgtattatccatgaaccaaccctctcaaaagtagcttattgtggttttgcgattgatgccggaactcgtgatgaagcggagaatgagcagggaatggcccattttgtagaacatctgatttttaagggaacggagaagcggaaagcctggcatatcctcaaccggatggagaatgtaggtggtgacctgaatgcctacacaaataaggaagaaactgtcgtctatgccgctttcctgaaagaacatctggaacgtgcgcttgagttgttgggggatattgtatttcattcaacctttccgcagcatgagatagaaaaagaaacagaggtcattatcgatgaaatccagtcgtatgaagatactccgtcggaactgatatttgacgattttgaagacatgatcttccgcaatcatccattgggaagaaacattcttggtaagccggaacttctgcgaagttttcgcacggaagatgttctatcgtttacccgccgtttttaccaaccgggaaatatggtgttttttgttcaggggcagtacgagttcaagagaatcatccgcctggtagaaaaatacctgttggatattcctgatgtgaaggtagagaatcggcgtacacctccgcctctgtatgtgccggaacatttgacggtggctagagatacgcaccaggcacatgttatgatcggtagccgtggctataatgcgtatgatgacaagcgtactgcactctatctgctgaataatgtccttggaggtcccggaatgaatagtaaactgaatgtgtctcttcgcgaacgcagaggactggtctataatgtcgaatccaatctgacttcctatacggatacgggagctttctgtatttatttcgggacggatgtggatgacatggatacttgcctgaaattgacctataaggaattgaagcggatgcgcgatacaaagatgacttcttcccagttggcggcagcgaaaaagcagttgatcgggcaaatcggagtagcgtccgataactttgagaataatgcgttagggatggcgaaaacattccttcattatcataagtatgaatcatccgagcttgtttttaagcgtatagaagagctaacagcagagatgttgttggaagttgccaatgagatgtttgcagaggaatacttatctacgttgatttacaaataattgattgacagatttgctttcattgccagaattcgtatttttgtagcagatacgtatgtgataacaatctaatagtagaaattgtatgttggtgacgggcagaaaactccctatcgggattcagactttcgaagatatccgcaatgacggatacttgtatgtagataagaccgcattgatgtggactatggcaaacatcggtaaacctttttttttaagccgtccgcgccgattcggaaagagtttgttaatttctacgtttgaagcctatttcaagggacggcgtgaccttttcacgggacttgccgtggaacaattagaaaagaagtgggaagaatatcccgtactgcatctggatttgaatgccgagaaatatgattcaccggacagattggatgctattttaagtaaccagttaactcaatgggaagctatatatggcaggggagaagatgaaaccactttgtcttcccgcttcttgggtgtcattcgtcgtgcctccgaacaagcaggcaggggtgttgtagtcctggtggatgagtatgataagcccttactacaggctattcagaatgaaccgcttctcaattcttaccgttctactttgaaagctttctacggtgtgttgaagagtgcagaccgctatcttcgttttgcttttctgacaggtgtcaccaaattctcgcaagtaagtgtgtttagtgatctgaaccaattgaatgacatcagtctgaattatgacttctctactctttgtggaatcacccgcgaagaacttcttgctaattttgaaccggagattgcagctttatcgcaagcaaatgacatcaatacgaaagaagttgtggaaacaatgacccggcagtatgacggttatcattttcatcctaatggagaaggagtgttcaatccattcagtgttctgaatgcatttttcagtaaagagttcggtaattactggtttcagaccggaactcctactttccttgtggagttattgaaagagagcgattatgatcttcgcttgctgatggatggtatagagacagctgcttccgctttcactgaatatcgtgctgataggaaaaatcctattccattgatttatcagagtggttatctgactattaaagattatgacagagagtttagactttatcgtttaggctttcctaacgacgaagtacgttatggctttcttaactttttactcccattttatacggcagtcacggatgaagaacgaagcttttatataggtaagtttgttcaagaactacgtacaggcaatgttgacgctttcatgcaccgctttgaagctttctttgcagattttccttacgagttgaatgaccagactgaacgtcattatcaagtcatcatatatttaatattcaaactgatgggacaattcacgcaggcagaagtatatagctcacggggacgtgcagatgcggttgtacgaaccccgaagttcatctatattttcgaattcaagctgaatgggactgttgagcaggccatggagcagattgaagaaaaaggttatgcttttccttatacggcagaggatcaacaagtgataaaagttggtgtagagtttagcgcagagaaacgaaatgtagagcgctggatggtagcgaaagaaatttaatataaaattgattatgaaaaacttaatacgaaatgtctgggtttgcttggggctgatggtgcttcccttcacagcctccggacaacaaaaggataacattacctatgtaccggctcaagagcttttactggtaggcaaagcaactaccgaaggcgaatacttccatcgggtagatacagccaagtattgtacaatgcctcccacagtgaagaaactattcacaaactctgccggtctggctatctcttttacaacgaatagccccgtcataaaagccaaatggatggttcctgataattaccagttacccaatctgaccagagttgctcagaaaggtctggatttatatatcaaacgggatggaaaatggcaatttgccggagtagggataccgggtggtgtgactacggaaaaagtgcttgttgataatatgggtacggaagagaaagaatgtttgttatatctgcctttatatgatgaactgaaaagtctggaaataggtgtttcttctgatgcacacatacgtaaaggagaaaatccgttcaaagaaaagatagtggtatacgggtccagtattttgcagggagcatctgccagtcgtcccgggatggcttatccggctcgtttgtcccgtagcagcggatataattttatcaatttaggattgagcggaaacggcaagatggagaaagaagttgccgagatgttggcggatattgatgcggatgctttcattctcgattgtattcctaatccttctcccaaagagataaccgaccggactgttgattttgtaatgacgttgcgccagaagcatccggatacgcctattattgtgatacagacattgatacgtgaaacaggtaatttcaaccagaaagctcgtgagaatgtaaaacggcagaacgaggtcatcgctgaacaggtagaagtattgcgaaagaaaaatgtcaaaaacctgtatttcataaaagaagatcaattcttgggaacagaccatgaggggactgtagatgggacccatccgaatgacttgggattcgaccgaatgttgaagaaatataaactggctatcagtaagattctgaagatcaaattcaaggctgaataacaggaatgaaagattataacagagacagatagaaaaaaataaaggtcaattcatgggggtgaattggcctttttcttttgcaaatgtgttaagttgctgttggtattttatagtttccttaaacctttatcttctaagtatttgattaattcttggggacgatcagtttgtatcatagttgccttatgttccagtatccatccccaatgcttatctttaccttctaatagggcgttttcgtcatcatgtccaccgcatagactatcccatagagtattcatccatacccgactaccagattgtacaattttatcaataacctttaaatttgaagtctgttcgtctttgaagcagagttcataggctattggcgtaaagtctttaataaaactttcggtcgcttttatatcttcttctttccataaatgaatgataggcatatagagcatactggtattggttccatattcctcttgaactttctcgacaggataccttccttttataatcacttgtttttccattccacattttcgaatgatgggaagaatctcctttatatatgttccgcctttatctatattgaccagaatacggtctttacatgtcattaacgcttcttctaaagtgggtatggatcggcgggtctttataccgtttccacttttcagcacaaattgttttagttctgttgtcgtatagtttttaatggcgccttttcctgttgaagtgcggtctagcgttgcgtcatgcatacaaataaagttgttgtctttggtttgctgaatgtcaagttcaaccatgtctgctcccatagcgatggcattctctatacattgtatggagttctccggagcattcctccagtcgccacggtgagctataacaaatacatattgagaattcttgtcgtgaagattcctcaatagtttatcaattctggattctgcttcagcagataatgaaaccagaagaactgataatagaaatataattttccttgtcatacgtgcttttcttaaataaaatgttttgatctatattgggtacctatgaaaaactatcctataaagttatcttaatcctttttcttttaaataagagttgacaagatcagagtaatcagtttgcacaacttctattttgttatctataaaagtttgaaggtgcgaatatttactattcagtagatcgctatcccaatctaaatgattggcataacctactaacttggcatctttaatagctcccattagttcagtgagagatgcattgtctattccgaattgtaccatttgtactttactgtaatatttggcgaggacttttacttctgccgcagtggatacccatggaaaaggaatggctccagggttaatagtattcatttcttcaatatatgatgtactggaaccagtataatagcaaacctggtcgatcatccctttttctgcaaccgttttaatgattttacctaaaagccccttctcttttacatcgacacaaacatagattttgcctttcgcagcatccaatacttcctcaagtgtaggcactttgtattcagtgatacctttagaaccttttaaaaaatattgataaagagtttgataagtcatattggctacagcaccagttccgtttgttgtagcattaatggttgtattgtgcatatttacgattactccgtcagaagtagctctagggtctatttcaatcatatcggcaccgacttctattgcatattggatagcgggaatagaattttcaggaattccgtcacgtattcccttataggtgttgctacgatgagcgcaagtccacattttcagacttgtgttgccggaaagattctttaagtcggttgttaaacttttagtgtcaggttcttcacctgggtcctccgggtcttcattatcatccggaggagtcggctgatttttgttttcatattcatcattggaagagccgcaactggtacacatcacttgcccggatacaagtaagatgattgccaaaagaaaaaatactttcttcatagtctttttattttatttattagataatgtaggataggttatcgaaataacctatcctgtttgatttgaattattttactgtagcagtgtgttgagcgtcttttgcacgcatcggccagcctgttgttggtaatcctttcacatatttggatgacagggccactaataaacttttcgattcatcttgagtgttagtaatggccacatagatagtcccgtctgcatccactaccggtgaactccagaatttgccttgtgttgcagcccattcggatgcataagcactttcgctgttagcaattgctccggccacatcaagtacggcaatagcgtcagtaccatttgcgtcaaggatatagaaattaccacgttccgtaccgaacaagatatgtccatccttatcaataacaggagtactgctgacactttctgatatctcatattgccatttgatagttccacctgctgacaatgcaacaattccgccaggcatatctccctgacttttcaatgaggtatatacagtgccatctgtgccgataacgactcctccctgatcttgtttgccggtattctcaataggggtagtccaacgtacactaccgtcactggcaacggaatagatggtagtagtcagatcagatgtataaatcatgccatatacatttccttcattgtctatggccattgatgcatgacagccgctgttcaaaccactgtcaaatgctctccatgcccatgggctgaaagtattgtcatctttagccatagtagcttttgctacaccaaacattccgtagttggtacacatgatatacatcattccttgtttggagataacaggacctgcataaacacctccggcaggaccgctggtaccatctgcgttagttaaatagctaacacggtttcctgttgttttgtctaccgcaatcattgaaccggtgcttcccccattaccacagtatacatatttatcatcaaatgctggtgacacactacgcattttggcattggcggcgttacctttattccagaaaccggtagtcggatcattgaaagtaatccatttcttatttccatcaggattgatagcaaatagtttaccattgcttccgtcacctgtgccaatgtagattgtaccatccgtatctacagacggtgtcatgtttgagcctcctgttgcctgcgctccccaagatggatcagtcatgtcgaatgaccatttttcaatacctgaagttacatcataactatgtaatatgtggtcattactattgatgtaaaccgttttttcatcaggagaaagagcggcggaattggaaactaacttggctaaatgagtggaggaggtccatagtaatgtaaggtctcctttttctactactttatcggtaatttcaattgttttccggtagaggttcgatcttccactgctgtcggttatggtcaaactaacaacaaatatacctttctcattgtacacgtgcttcgggttttcttcggtagaagtcgttccatccccgaaatcccatacataagtaaagttgccactacctccataagatgcgttagtgaattgtatttcaccttctatttgccctctttcgggagcgattgagaaagttgcggaaggaatgtctttcccggcattgtcttcgttgctgcatgcggcaaataataaaagacaaacaatatatatgaacggacatatccgtactttatttttaatagttgtcatacacataataatcatttaaggttttgttattaatttcctgtatatcccgcatatccgggattttgtgggtaggctaccgtaccggccatgtcaatctcatcttgaggaatcggataatacatcagataagtacgaccatcaagtgtttctagcaattctaagcgatttgtacgtttgatgtcctgccagcgcatgccttcagcataaaattcacgacggcgttcgtccaagatcaatgtctgatattctttgtccgatagagctttgattgctgcttcacttggagcggtagtatatctttttttcatatattccactaatgcggcggctccgttcgtttttccgagagcttcggcttttatcagatacatttctgaaatacgggagattactaccggtgtgcaggtataatctgacgtttccgccaattgataagttccattcggatatttgattacgcggttggcatcttggctggtgaatgtggcttttaaccgtacgtctcctttgcgtgaaagagtattatcatcagcaaaaagactattataacaccaatcagatggagcataattccatgaaccgtccgtgtcattaacgtataatgtgaagtttagaggactggatgctcttgaattattaacataggcaaatataatttccggacttgaacttcctgcaacccaatttttagagaaatccatagcggtggatgcgagtgagaaactggaattagctaatactgcttctgcatagtttgcagcatccgtcatcttgttctggaaaagagctacacgtgcagcaagtgcatttgctgcgtcagaagatacgtaccatttggaatctgcttttgacagtaagcggatagctttacccaaatcctcttcgatgaatgtccatacttcagcttccggagagataggaaccacctcttttgaacgtttacgcaggatggggacatttccataatgagaggccagacgataataaataaatgcacggaaatagtaagagacaccacctacttttttcatgagagcactttctttattttcggaagcttcataagtttctacgagaaaattgacctgatgcaatgttgtaaatgagtttctccaaaaggagagaatgttaattgcctgattggtatacgagggagacatttcacatgggtctgtaatttgacctcctccaggacctgctttgaaattttccccttgtatatcatccaaccaccagaaagtgaatgtataattttccatagtggcgtatactccatttaatagcttttcgagatcatcatccgtcaaggctgattgaggaattgcatgtcgggggctgatgtcgtccagccagtcagaacagctcgtggcgagtacagttatggtcattaaaaccagagtgaataatagttttatatttttcatatcgttagttttagaagttaatgcttgcacctatgataaaactctttaatgtggcttgttctccgaaatctgctccgtagctgttgcctgtcggattactttcgtatgagaattccggatcatatccggaatatttggtcagtgtaaaaaagttgtcgagagaaacaaagatgcgagctcccgttacgtgtatttttgacaacagagaatgaggaaggctatatcccaatgtgatggttttgaatttgaaataagaagcatcttccagatagcgggtagaaacaagattgtttccgaaaccgccggtgaacgtgcctgccaaagtagggcgtggaacagtgttgctagttccttctcccctccagtaatggttggcggcatattttgatatgttatagaattgttccgaattgaccagtgtgccatttttgtaacctttgatactgctggacgccaagccgagatgttccgtaccttctgttcccccgcagcctttccatgctgacaggattttacctccggctgcaaattggcagaaaatggataagtcgaagtttttccagttcatagtcgaagtgataccaccataaatgtcaggtgtaacctttcctacatacatgcggtcatcgtctgtgatgtctccgtcattgttgtagtcaaagtacttacaatcaccggcacgtactccttttgcgtagagtttgcttggtacttcctggtcggtttgataaataccatcctgacgcaacatatagaaagcactaaccggtttacctaccattaaagcatgcattactttaccggtattggcaccaccaccgttgattttcatatcaagtactccatccaatgacaatagtttgttttttgtataggagaggttagtagcaagctcccatttaaaaggaccatcgaatattttaccgcttaccatcacttccaatcctttgttctccagcgagccgatattggctgtccgggtagtatatcctgttgtagcaagtgtactgatattataaagtaatccgcttgtcttttgatagtatccgtctacagatagcgccagtcgtccgttgaatagctctgcgttgattccgacattcacctgattagctttctcccagataagatccgcagcatctgctccgattttaaaaccggatgaaccattataggaatttcctcccgaagttactaatgacatagctgcccagttactgataccatccatactgccagtcttaccccaactggctcgtagctttaagtcattcagtggcgtgcctttagggaaaaaaggttcgttgataatccgccacgcgaaagaagcagaaggaaatgttccataacgtttatcttttgagaaacgtgaagaaccgtcacgacgcatcgttacatttaagatatagcgattatcccaattcagggcggcacgtccgaaataagattcgagtgcatatgcattatatccgatactacctgcgtagatgttagaaccggaatttatcagaccgaagctggaagaaggataagcaccgtttgcgtaattatcactgtaagctccaaaagtttcatagttatactcttcgtatgagtgaccaagcattgctgaataagtcagtttatcccaactattttcatacgaaattacgttgtctataacatatcggtaacttacatttttctgttcgctaagtgcaccccatcctgcatttttggaacgtgcgtcatgtttctctgaaattgttttcttttcttcatcaagaataccgtatatgctgaatgagggggtgtatttgagtcctttgataggagtaatatcaaaactaagggcagctactccttgtttcttatgtacagtccagtcttcttcattaatcagcataacgggattatgacgacataattctgttgacatcactgtatagcctccatcttcccgataagctccaatccatggttgttcttcacgggcagtacgaatcactttcaaactggtagatgactcttccactttatcgaaacggctgtaagatcctgtgagattcagattcagtttaaaccatttgttcagctgatgagtaaattttgcccttaggttggtttgctggaatccgctggtacggatgataccttgttggtcgttaaatcccacagaggtgaaaaaggtagttttctcattacctcccgagagattgatagatgccgtagtagagtgtgctatatcacgttgaatgagtccgagccagtctgtttcggtaatccggtcggggataaagaatgattttgtgtccttcttctgcacattccaattatctacggctgcttgcatagtacgagtatattctgctacatttgccattggtatatcgttggcaatccatccaaggctgtggcgtacactggcatttacgcgtgttttactgttggtgttccccgattttgtggtgatgatgacaacaccgttgttagctcgcgaaccatagatggcagcagctgaagcatctttcaatacgtccatgcgttcgatgtcgttggggtttagcataggcattgattcactgggaactccatcgaccacatacaatggggtgctgttacctgtgatggatgcaataccgcgtacccgtacactcggttgttcaccgggggtgccgctggcagaggctacatttacaccaggagtacgaccttgcagcatcttggctacattgtagtcactgccttgatccagatcatccactttcaggctactgatagaagtggttactagtttttcggactgggagccatagccgactacaactatctcatttaatgcaatgctgctttctttcaaatatattttcagattgtttttattgccggctttcacttgttgtgagtcaaatccaatataagatactgttagtggttggttaggatctgctacaatggtaaagtttccgttaatatctgtaatgactccggttccttttccttgcatgacattggcgccaataataggaattccactttcatctagtacggttcctttaatcgctctcttttcattacttctttgttctgtctcctgctttaccaatacgatggtgttgttggtaaatgaataagatatattcaaaggagtaaatacctgtgagagcgcttcgctgataggtttctttgtgcagctaattgtcactttagtctgatcgttaagaacatgattccggtatacaaaagtatatctcgtttgctgttctacttgtttcatgaaagtttttaccgtgccatttttgatatgaatggacacattttcttcttgggcaaacactcccgaagggaataaaattatagcagcggataaaatggtaaagtttctaaaaataaggctgttccgcagtttccttctcaataaaaatgttaactttgtgatattcatagttgataatgttttgatgtataaaattttatcgacttccatacaaccaaaggattgggcgattctttggttgttcttttttgattttaactactatgtgttttccataagctcctttcttttaaattagtaaatagttattatatctttatgtatctcgtacttaaatccgtattgtatgcttaaggatcttatgacattctgtatactttcgtttcggaaagatcccgatagtaaatcttgtgcgatttgcttatgatgcaatctgatttccaccccataccatcgttctatctgggctattacatcaattaatggtgtggattcaaagatgaggtaattatctctccatccggcttcaacatgggcatccgctttgcttattcgtagtgttctgtccatagcggaataggttgccttttgtccaggtgaaagcgtatattcatggggaagtgaaccacctgatattctgattcgtccgctaagtaaagacgtttctacaatgtcttttttataggtctttacattgaatgaagttcctactacttcaatttgcagatcgttgattattaccttgaatgggcaatcgggattcttggcaacatcgaaaaaggcttctcctgatagtttgacgaggcgttgcttggagttgtttacatcatattccaggtttgtagccgcatttagatgtacaaatgtaccatcagggagagccatttctgctttactgccagctctaactgttacagcaaccatttgactttccgggttattcatccatgtataaagtccaaaagaggatgataggatgatagcgataatggcagcatatttcatatattgcagccaacggcgtctccaaatgatttgttgtagttcctttcgaatttgctttttcatcataggaggcatctttatctctactgtgtcgttttccatatctatcatggtattccataactcttcgtcaggtatgttgttgagttcatttctgaactttccaatatcggaagaggtgattcctttttcgatgtactggcaatataactttttaaattgtggactcatattattggtgtttctataggttatacgtaaatacataaagggagtactagactttttttatgttgtagagcatagaaaaagttaggaatagtaggtgtttgtagagttttgtggagttttaattattcctactgaaagtgttattcttgttacaggaagaaaataaagagaatattatatttcatcatttcgctgcgaagaatcttcagggcggaagtcagatagtttttcaccgtttgttcggagagatccagttgttcggctatttgcttgatggggatatgtttctccctgcttaattcataaatctcgtgttcccgttgtgacagaactttcttcgattgttgaagttgttgcaggaattcgtcgtacaataagatatcttccggcgatacgtcagttgcctggttctcgcaatactccatgaagtcttcgaattgcagttcgttgacttgtttgcggaaataatcgattacctgatgtttggcaatagtgaaaataaaggcttgcagattgccgaagctattcaactggttacggttgtcccataggcgtaaaaaggtatcctgaacaatatcctgtgtcagggaacgattttttagttgtttaagaacaaagctgtaaagtcggtcggcataggcttcataaatctgtgtaaaagcctggtaggagccgttgcgtagttcttttatgcactgtatttcgtctattttcatcctttctgcaatagaagtaggtcgggcaaatgtactgaaataatttagaaatcaacaaatctatgtgaataaataaagagaaaccgatgtccggtagttggcagatgaattttattttgcaatcatattacaatcatatattgagctttattgtgccgtctcttgctttccgctaattaattttgtatctttactgttttttacccttgtaaagacaggtggtcaccttatgcagtgataaatatcaccttatacagggcagacgcattaaaaattattttcctgtaaaagttgtgacaaatatttttcatcccatccggcttttagtcttttcagattcatgcttccttttgttgttttttcattctttagtatggtaagtgccatctttgttgccaccgaaaagtttctggctgcatttttcacctttttactgtagtcttctcgaaaggtaacatccagttgccaatgaagattattttcaatagaccaatgctgcctgatggcagatgcaatctcctccggtttggtattatcaagtgaagttacatagtatctgacctcttgagtatattctcctgttgctactattgttctctccgactttatccctacaatagacttcaaccccacaagtttcttcttaaacattttctccataatagatccataactgactacagtacatgttcttgtctcaatccttccatgtccggtgttttccgacacatgcctggtgactctattgattatttcatctttatcctgataatcgtcaatgatttgtttagctagttgataattttttttcttattctcctttatagctataatataatttgcatcatgctcaataatggtctgggttatatctttctggcatcccatcgcgtcaattgtaacaatacaaccacttagttccaaagagttaattaacaatggaatagctgtaatctcattgcttttatcatctacttttacctgacctaaagaaattccattagcggcagaccaggcggaaaccatccataatttgaatccttcttttcccgtagtatgctctccatcacattggcttggaccacgcatgagcttgccatctatagctacaacgcctttcacctcctgacagacttgttttacccagttacgaaagatcaactcaaaatactcgggctttattatactgaagaatctattaaaagtatcatgactggggatgaactccaggtcaggtatgcgacttttgaaaaaagcaattttcgcattgccaaattcctcaatctcattccaggattgggcgccacagattacagcagcaatggatatatagataatggtttccattttatgtacttttttgcggttcatcctaggatcttctatttgtttacaaaggtcaattatgccaattttcatgttagtttatgttttaatatatcttataaagataagaaaaacaatcgatataaacaaatgatagtgtattaataatcagtagtatagcaaagaaataacaaaggagaatatagtaaaaaatataatgcgtctgccctgtcaccttataaggtgacattaggctgtttacaaagtgactattgtcccgttacaatcggacaactatccgagtgcataaacaatgataaatctctgcactgaaaatctttattctctgcactgaaaaatcttaaatataacaataagattatggccttttacaatttaaagaagaagcctgccttgactactaaggaaggagaaacggaaacaatgtatgccgacattgtctacagtggaacgattccggcagaacgattgatccgtggtgttgctaagagaaccggatttaaggaaggagtgatagaaggtatcctgatggaactgaaagacgatgtattgcaatatctaggtgaaggataccgcgtcgaattgggagagttcggcttcttttcagccaaagtgaaagcttcccgattggtagcaaataagaatgatattcgttctgaatccgtagctttcaacggggtgaatttccgtgcttccaagagtatgcgtgtgggtattcgcggagatttggagcgtagaaagtgtgtcgatttcaacacttcgcgtaagtgggacagaaacaatctggagaaactcgtcctgcaatatatcggagagcatggcttcatcacaagagccacttatacgcaacttacaggacgcctgaagaatactgcattggacgatcttaaatcttttgcagccgaaggcattatcaagcgagagggacggggtaatcagatgcatttcattgcaccgccacgaaaggaaccggatggcgagtagtgaaatctaacggaatatcgatggaaaccttgtcgtacaagattggagattgggaacagaacagagaaatgaagaggtagtatctacccgaatggattgaatcagtgcaaaatgtggtataagtatgatgtatggctaaaaaaatacagtacctttggctgtgaatacaggtaaaacggtgatgaggtgtctatgaaacagccttacagtggatttctcgtccgaatgttgtttgaccgataacacagactataatatgttggatatcatatactacttcaatatcttcggttgtctgacgatggggatggctctgctgttgattcaaacagccccacagctgataaacccgcactaccgcaatgccaaacgattcctgggtattgcatcgattatcgtggctctgtgcaatgcgcttatcttttacaacagggtacaggagagcgttgccgaaatatttgcaatgcctgtgctcgttgcggcacagttgcaggcggcgctttttacttttatcgtactgatactttttcattcaccatacgtttgccggcgaaatattttgcgacacctctgcccgacattgttttttgtgggactctatctattaacgatacttctatttcctgatgtgaggatctattcggtggatgagtatatagcgaatatcacgaatccggttcttttgttaagaactgtatttgcggctacttatctgacgcagatcgtgatttacgtccgtttattccggcgtgagcaacggaattatatggccaagattgagaactatttctccgacaccgacaaatatgaattccggtgggcttcgagactgttctacgaggctgcctgtatcggcattgccgttctggtgttcagtatattccctgccccgttattcgacggaataattacggtggtggttacagtgtactactttaactttggagtgaggtatatcaactaccaatacaaactttactatgaggctttgcccgcgatagaggagaaggaagaatcgcagccgacaaaggagagtgaaggagacagggaactggaagatgaaatggcaaaactattattgtatctccagcagggtgttgtgctgggcgactatgccgaggctctgcatatcccggaacggaaactatctgtattcatcaattcgacttacggggtgagtttcaaacgttgggtgaacaataaacgggtagaatacgccacagagcaaatggcgaaacatccggattatacaatggagagaattgccgagctttcgggttttgcccacaaaagccatttctgtaaaatcttccgggagataacagggggatcttttaccgagtacaaaaatagataacacctccaagctgttgtatattgggtgatacagcttgtttaaacatacaataaacccacaaaaaaacacttgtgttgcacgtttcgacgtcagatatgcgtaaacgtgcaccaatcatccaaaattttcattatatttttgctgcgtagggcataaaccgctctgcgcttttttgttttcccatgaatattaatcaaatataaaacaacatgaaaaagatttgttctttgttagtgctatgtgcaacagtagtctttgcttcgtgcagcaaggacgatccggtaacggagcccgtgccggaaggtatcaccgtcaccacctacgacgccctgctcgacgccctgcagacgggcggcacctcggccgacgctccgacactcgtcacgctgggcggcaacatcacgatacccgcgggaggtgactataccacccctcccatgaacggcagcggccacttcaagatagacggcggcggccacaccatgacttgggaagacggcaacaactaccacttcctcggcaatttcagccccgatgccgatgccgtttatatcgaactcaccaatatcaatctggtccagcaagatataaaatctgcggtatgtgttatcaacggcaggattacgctgggcaaagacgtggcattgacaatgaatgggcaatatggagacatgattgtggctgtcggcgagaaagcggtattggaactgggtgagggcttcgaattgtcttgcacggcagtcagcagttcgtgctgtgtaatcgtccaggagggcgccaccctcgtgctgaacgggggaaagaccgctgccggggcttacatagacctaaactgcgatttttactcggccgcctcccatccccttatctccgttccgaaagccctcacgggtgatgtgcatctccttttcaccatgaccggtgtaacctccatcgcccaaggtgccggcggttaccaactgacgcaggcggactgcgaccgtctgaaagtgaatccggagtcaatggtcagcctctatggagagccgtttcagaagtacgccgacaacttcgagctttacctcgacccggcggcggaacatcaaatcaagctgcgccggaagaatttcacaccccccacttccggcaacatcgacatgacctccatgactgccgacgaagcgcagctaaccatccgtgccgccgtcgccgcaggcttcaccgacctcaagctgacgggcgaactttccaaaacaggaattggcggtaactggggtacatttatcaataataaaaaaattacgaaatgcgacctcaccggagtgacggactggggtacaacgccaactctgcccgaactcgcctttgcgaattgcaccgccttgcaggaggtgacgctgcccgatgatatgaaggtaatcggaactggtgctttttcaggttgcgctgcgctgactacggtgaatctttcgcaggttacctggattaatctaaacgcattctggggatgcacttcattggagacgctcgctttggataatgtgactgcgataggccaggaggctttctacggatgcacgggcctcgaaacgctcaaaataccgaagtgtacccagttcggcaattatatcgtaacgggctgcaaagctctcacccggatagaagccaccgcagccggagatttcgttagcataagtgatggtaccaccagtatagagcacaccgccgtttttcacaacagagacggtcataccggagataacgcattcgatcccgccaagtgcgacctcgtgctgaacgccgacaagcagtatggtggcactgccgtccccacagccacagcctacaacgaatggactgtgggggaaaacggttcccccatgaaatggaagagcgtcagcatcacgccaccgtaatccgcgcctttcccgaagttgaacttcgaggcggtctgatttattttgggaaatccaattttatgcctgatgcggtagacgacatatgttgtcgtaaaaagattatatcttaattagtagtcgattaaaaacgctctgccattggcagattacaaaatatatctccgcccaacttgcaaaaagggtccctactgtcaaattgcagggatccttttgctttatacaatttactccgcatgacttaggaaagctgtcctctgtcaaaaggaagattatcgaataacggagttttttttactgtcgaattgtataaaaaccggtcgtgagtttgtttcctgagagaattttgttacttttgtattcgaaagagttacttgaagatacaactctgcaaatcgctaaaatgcgcacagttaccaaattgttatctctcaattccccaaattatgcaaagtgtttattcttcaattggttatcttaaccgcgaataatctaaaataaaaaaacgatgtttcagaaacttgtagctatagagccggtcagtctggttccgtcggccgaaaaagcgttgtattcatttgccggtcaggtggtgatgtatcctgatgtacccgcgagtgatgatgaaatcattgcccgtatcggagatgccgatgcggtgcttttgagttatacctcccgtatcaaccggtatgtacttgaatgttgtctgaatgtgaaatacattggaatgtgttgctcgctctattctcccgaaagtgcgaatgtcgatattcgctatgccaatgaacggggtatcacggtaacaggtatccgggattatggtgatgagggagtggtagaatatgtcgtcagtgagttggtgcgctgtttgcatggcttcgggcaggaatcgtgggaggagttacctcgtgagatcaccggcttaaaagtcggaatagtcggattgggtaagtcgggcggcatgatagcggacgctttgaagttctttggtgctgatatttcatattatgcccgcagtgagaaagaagcggctactgccaaaggatattgctttttgccgttggagaaactccttgcagagagtgaagtcatttgctgttgccttaataaaaatacggttctgctgcatgaagaggaattcaggcagatgggtaatcggaaaatcttattcaataccggtttgtcgccggcatgggatgaggcagctttcgctgaatggctggaaggtgacaacctttgtttttgtgacacgataggcgcgttggggagtgagcaactgctcaatcatccgcatgtacgttgtatgcaggtgtctactggccgcacgcgtcaggcgtttgaccgcctgagcgcaaaagtattggccaatctgtcagaatacaatgggtgatgtgatattaatcagggtgctcactactgaccaccctgcaatatccgatgtagcactataaatgtctactacggcatgcacctggtcatttttgatttctaccctttgcgtatctcccacaaatccgggggtagattgtatggatacctgcatgttctccggaccgacagaagctcgtgaggcggcaactgtaacattcactttggttggaaagaggcgaatagcttccgcagcacttccggagaaaacagtacgttgctccgtttgcaaggaatcatcataaacgggagttcctttgagtccgttaggacctttttcattgaagaagcgggccgtcgtatttcccatcagagaggcagttcttaaaacatcgaatccaccggtagctccggatgcgatatagattcgtgtgccatttgccttggcggtttctgccacttcccgatagaatgtctcgtctgccaaagcaccgatagacaaggtaatgacagaggttccgtttctcaatgctggcaaagccaattcccgcatagcggcaggagaggccgattccaccagataatctggttttaatgctaataactcttccaatgtggcgcaagcaatgcaaggcttgccatgttgctgcattttatgaacgatgtgcgctgcttttgaagccgtacgcgaatagacacctaccaagtcataatctggtaataagcctttgacaactgcatccgcaacgattcctgcaagtcgtccacatcctacaatgactaactttttcatgcaacaaagataatacttttattggtaagagcttgggttggtaatatggtatttattttcatcaggtatgtatccggggtttgttcctttaatttatgagccatttgtaatcagattacgaagattttctctacatttgtctttattagtcttgtaatcttctattaaagtttaatactccgatgaaaaaaaagtacctgatatttcttttacttctctcttttccactatatacccgggccgataagaccttggactcactgttgaatgtgcttgatttgacgattcaggaacatgaaatttatgtggttcaacgagaatcacgtatcaagcaccttaaagaactgacacacggaatagaacctaattccgcggaacagtacaatctgaacagtcagatatacaaagaatataaagcctttatttgcgactctgccatccactatttgaatgaaaatatccggattgcagagcgcttgcgtgatgcagaccggcagatagaaagtcagttgcagctttcgctattattatcatcaactggaatgtataaagagtctcttgatgtgctggaatcggtagaccgtcggaaaatcattcctcgtttaatagccgattattatacctgctttgaccatgtgtatggcgagttgggcgtttatacacaggataaaaccctttcgggacgttattggagtatctcgcaggcatatagagattcattatatgctatattgcctccggaatcggaagaatacctgctgatgcgtgaagcatcatttcgcgatcaacgccagtatgaggaagccctgaaagtgaatgatcttcggttgacgaaaatagaaccatatactccccaatatgcgatggctacttatcatcgttctttgatttacaagtacagtaatgatagtctgggagagaaacggaatctttgtctttctgctatatcggatattcgttctgccattaaggaccatgcttcgttgtggatgcttgcccagctactttacgaagatggtgatatggaacgtgcgtaccaatatatgcgcttttcgtggaatgcgaccaagttctacaatgcccgtctgcgtagttggcagagtgctgacgtgctttcattgattgataaaacctatcaggcaatgattgaaaagcagaacgaccgtcttcaacagaacctgctgcttatcactgcactattggtgttgttgattgtagctttgggatatatctaccgtcagatgaaaaagctggcagatgcaagaaatcatcttcaggtagctaataagcagttaaacggattgaatgaggagttgaggcaaatgaatagttgcctgtcttctaccaatatcgaactctcggagtccaatcagattaaggaagaatatattgcccgtttcatcaagctgtgttctacttatatcaaccgtttagacgcttaccggcggatggtgaataagaaagtgtctgccggacagattgcggaattattaaagataacgcgttcccaagatgctcttgatgaagaactggaagaattgtatgcaaactttgatacagcctttttgcatctcttccctaactttgtgggaaaattcaatgacttattacaggaaaatgaacagattttaccgaagaaaggcgagttattgaatactgaactgcgcatctttgctttgatacgtctgggtattgaagacagttcacaaattgcggagtttcttcgttattcggtgaatacaatttataattatcgggcgaaagtaaggaataaagcccgtggatcgagagaggattttgacgatttagtgcgaaaaattcgctaattcggactgtaaatcaaccacttttttaggtatacgttctgaatgtaaatagatgaaaataagtggattatcgttttgtgtaatccacttattgccccctccttgttagctcactttaatttctttatacttttgacctgtgcttcgaaagtaatgagaatagcccattgctgacgagcgtcttattattaactttaaaacttagtacgcatgaaaaaaaacaggcgaaaaatcctttcggggagtcgcaagattttctttgctatcttggcaatgtttttatctttgagtgcatccgcacagcaaattactgcatccggtcaggtcctggatgctcaaaaagaaccgctaatcggtgttagtgtacaagagaaaggtacgtctaacggagcaataaccgatttagatggcaacttcacattaaacgttaagcaaaacgccattttgatattctcttatgtgggttataagtcgcaggaggtaaaggcagcccaacagatgaagatcacacttcaggaagataatgaagtgcttgatgaagtggtggtcatcggttatggttcggtgaaacggaaagatgtgactaccgctatctcttccgtatctaccaaggatttggatatgcggcctatcgtttcggcaggacaggccattcaaggtaaggcagccggtgtctcggtgattcagcctaacggtacgccgggcggtgaaatgtctatccgtgttcgtggtactacttcaatgaatggtagtaatgatccgttgtatgtagtagatggagtgcctgtagacaatatcaagttcctttctccgaatgatattgagagtatgcagatattgaaagatgcttcatcggcatctatctacggttcgcgtgccgctaacggagtcattctaattactacgaaggccggtgcagccggtaatgccaaagtttctttgacagcccagttcggtttgaacaaagtggccgataaagtagaatccctgaatgcagcacaatataaagaattgcaggatgaaatcggactagtgtctttgccggacggattacccgaccgcaccgactggtttgatgaaacgtatacgaccggaaagactcaaaattatcaggtagctgtatccaatggtaatgagaaaatgaaatattacctttctgcgggttacctcaaagaacagggagtgttggacatctcttattacaagcgttacaatttccgggtaaatctggaaaatcaggttcgtaaatggctgacagtaagtgctaatatctcttattcagattatacaagcaatggaggcggagcaatgggaacaggctcgaatcggggtggtgttattctggctgttatcaatacaccgacttatgcgccggtgtgggatgctttgaaccctaatcagtattacaataacttctatggagtggggaatatcaccaatccattagaaaatatggcccgtgcgaaaaataacaaagacaaagaaaaccgcttgttggcatcgggtaatatattgctgactccatttccggaactgaagtttaagtctactcttactcttgaccgtcgcaacgccgttaataccacttttcttgatccgatttctactgcttggggccgcaatcagtacggtgaggcttcggacaatcggaatatgaacacagtgctgacatttgataatgtattgacttataataaaaacttcaagaaacatggcttggaagtaatggccggttcgtcatggacggattcagactattcaaatagctggatcaatggctcccactatcgtagcgatcagattcaaacattgaatgctgccaataaaatatcttgggataatacgggtacgggtgcgtcccaatggggaattatgtcattcttcggacgtgtagcttataacttcgacagtaaatacctggtaacagctaatcttcgtgccgatggttcttctaaattgcatcccgatcatcgttggggcgtatttccttcattctctgcagcctggcgtatttcttcggagaagttcatggagaaccttacatggattgacgatttaaaattgcgcggtggctggggacaaaccggtaaccagtcgggcattggtgactatgcatatttgcagcgttacaatatcggtcgtatcgaatggtttaagaaaggcggcgaaggtgattctactgattatgcaaatgctgttcctaccattagccaggccaacttgcgtacatctgatttaacatgggaaaccacgacacagaccaatataggtctggatctgaccatattgaatggacggttgacgtttaatgccgattattattataagaagaccaaaaacatgttgatgaatgtgtcattacctgccggtgccgcagccgctacgtctattgcccgtaacgagggtgaaatggtaaataagggttttgagctttctattagttcgaaaaatcttcgtggaggagcatttacatgggatacagacttcaatatctcttttaaccggaataaattgacaaaactggaattacagaaagtttattacgatgctaaaactgcggatgtggtgaatgactatgtggtacgtaatgagccgggccgtgctttgggaggtttctacggttatataagtgatggggtagatcctgaaaccggtgaattgatgtatcgtgatttgaacaatgacggtaaaatatcatcttccgaccgtacctatatcggtgatccgaatccggatttcacctatggtatgactaataccttttcatggaaaggctttaacttgagtatctttatccaaggttcttatggaaacgatatttataatgcttcacgtattgaaacggaaggtatgtatgatggtaagaatcagtcggttcgtgtactgaatcgttggaaaatacccggacagataacagacgtgcctaaggctaatttcaaattgctcaattctacctattttgtagaagatggcagttatctaagattgaaggatgtttccttgtcctacaacgttaaaggtaaactattgaagaaatggggaattacccgtttgcaaccttacttcacggctactaacctgctgacatggaccagctattcgggaatggacccggaagtaaaccaatggggtaacagcggtacggtacaaggtatcgattggggtacttacccgcattgcagatcatacgtgtttggtattaatgttgaattctaatgaaaggaaagattatgaaactaagaactatattttacggattaacctccggcttgctattgggactttcttcctgctcgctgaattatgagccattagacacctattcggatgtgacggaaggagtgacaagtgatggtacaaaaatcgtattcaaggataaagctgcagttgaaagtcatctgacaacgctttataatcaaatgcgtgaccgtcaggaacattggtatgtggatttacttttgatttcagactcccattcggataatgcttatgccggtactaccggagcggaagttgtcccgtttgagaataactctattgaaggttccaattctgtgttggaacgtgactggaaccgttatttggaggatgtggcccgtgccaataaactcatttgtaacattgacctggtgacagataattcgttgactactgccgaacgggcgcaatacaaagcagaagcgaagatattccgtgccatggtaatgtttgacatggtacgtctgtggggtgatttccctgtgattacaacggtggctgatgatattacttctgaaaacattgatgaggtatatccacaatatttccccaaacaaaatacggaacttgaagcttatcagcagattgaaaaggatttgttggatgcagtattgtatgctccggacaatacgccggggaataagacgttgttttccaaatctgtagctcgtaccttattggctaaaatatatgccgagaaacctttgcgtgattatacgaaagttatccaatattgtgatgaggtgaaagcagacggttttgatctggtagatgatttcagtgatttgtttggaatgaatgctgcgggaacagatgcaaagatgcgtaatacaaaagaatcgattcttgaagcacaatttacatccggagcaggtaactggtgtacatggatgttcgggcgtgatctcgtgaattggaataacaatttcacgtgggcgaaatgggtgactccgtcacgtgacctgattagtgctttcaaacaggaaggggatgaagtccgtttcaaagaatcaatagtctattacgattgtaattggagcaactattatccgtctgataattatccgtttatgtataaatgccgctctgccaacagcagtattatcaagtaccgttatgccgatgtcctgttgctgaaagcagaagcactgattatgcaggatacgccggatttggaaggagccgccgatataatagataaagttcgcgaccgtgccaaattgggagcacttcccacctctgtccgttcaaacaaaaacgtcctgctgaatgccttacttaaagaacgtcggttagaactggcttttgagggacaacgatggtttgatctggtccgtctggacaaggtagaagaggtgatgaatgcagtgtattccaaggattcaggtcgcaaagcgcagatttatacttttgataagaactcctatcgtttgccaattccgcagtcggtaatcgacgcgaatgataagattcaccagaatccgggttattaattcaactaaaaacatagaaaacttaagattatgatagacatgagaaatatagcattgacctttttaggatgcttcaccatattagctgcatgcagcaacagtgacgatgcggagaaaccggttacacctgttccgaccggagatgtgactatttatgcgaccactagcagcctgactcgcgatttgacccgtgatgccgttaatttcagctcgaaagataatttggcacctacttcaatcacattgaatccgactgaacaatatcagacaatggacggcttcggagctgctatcacaggcgccacttgttttaatcttctgcaaatgaaaccggaagatcgtcacgccttccttacggaaacattctctgacgacaaaggcttcggatttagctatatccgtatctctatcggctgctcggacttttcattgagcgaatatacctgctgcgatacgaaaggtattgagcattttgctttgcaaagtgaagagaaagactatatccttccgattctgaaagagattttgagcatcaatccttctattaaagtcattgccgccccttggacttgtccaaaatggatgaaagtaaagagcctcacagatcttactccgctggattcatggacaaacggtcagctgaatccagcctattatcaggactatgccacttattttgtgaaatgggtacaagcattcaacgccgaaggcattgatatttatgctgtaactccccagaacgaaccgttaaaccgtggtaattccgcttcgctttatatgagttgggaagaacagagggactttgtgaaaacagcactcggacctaaattcaaggcagccggactggctacgaaaatttatgcatacgatcataactatgattatagtgatattgcaacagaaaagaactaccccggtaagatgtatgaggacgcagcagcttcccaatacctggctggagcagcttatcacaactatggcgggaatcgcgaagagcttttaaatatacataaagcctatcctgaaaaggaacttcttttcacggagacttctatcggaacatggaatagcggacgtgatttgtcgaaacgattgctggaagatatgaaagaagtagcattgggtacgatcaacaactggtgtaggggagttatagtatggaacctgatgcttgataatgaccgtgctcctaaccgtgaaggcggttgccagacttgctacggagcggtggatatcagtaatagcgactataagacaattatccgcaactcacattattatatcatcgcccatctctcaagtgtggtgaaaccgggagcggtacgtatcggtgcatccggctatgctgatagcaatatcatgtattctgctttcgagaatccggatggaacatacgcttttgtactgatgaataataatgaaaagactaaaaagataaccttaagtgatggtaagcgtcattttgcttatgatgttccgggcaaatctgtgacttcctatcgttgggcaaagtcggaataagaaccttaaaacgatcaagacaatgaaaaaaaacagttatattatattggctttggcaggaatgttatccatgaactcctgtaatgatgacgaattcttgcccggtaatccgagtatggaaatcaaagcagagaatgcagacgctctttttggtgacagtcttccgtttacgattaaagcctcggatgtggatgtgcctctttctacgttgaaagcacagcttttttatggagaagaacaagtgtctgaaacggtcatccgtacaaagacaagcggaaatgactatactggtaaaatctttgttccttattatgctaatattcctaatggaaaggcaactttgaaatatattcttcagaacattcattttactaccacagaaatgacgaaagaactcgctctggcacgaccggacttcccctatctgacattagtggatgaggaaggaaaagagtaccggatggaacgtcaatccatgtacaagtatagtgtgacaggaggcttctcgcaaaagatgaaagcgtatatcaagactccgaaagtgggagagaatgggaacgaattgaccttcggctgggagaatggaacgattgaagccggttctactaatgctatctcattttctaatacggaaccgggaaattatgctatcaagtttaatacgttgacttacgaggcagaaccatttgccaagttaaaggtgaacggtgaagatatggaattggtagagaatgatatctatgcaatcaagttgactttgaagaagaatgacattctagcgtttgaaggggtgcctgattatgataattggtggatagaccaggattattttgaaaagcaggaagatggaacattgaaattcctgccgattgacggaagttaccaaataacagccaatggtaaaatgaagtatttctctgtcattgctttgaagaatggtgaggctgccaagttgcaggatgatggaacaggtgctatctgggctattggaacaggaatcggtaaaccgtcggtggcactttctgaagtagggtggactccggaaaacggtctgtgtatgccacagcttactgcgaagaagtatcagctgacatttatagctggcgttaccatgaaagtggatgatattaactttaagttcttccatatcaataaatgggacaacggcgagtttaagggtgatgctatttctacaacgagtgaattggttaaaatctcatcggacggaaacttgggactggaagaaggtcaaaagttcgaaagaggaggtatttacaggtttacagttgatgtgacgaaaggcaataccaaggctgtgttgacagtggagaaagtagggaaggtagatttacctgcaccggatattttctttggtaatgataagatggaggtgacagatactgatatatataagtcggatcaggcgtttacacaaggacaaatgataactgttacaggcattgataatttgaatgaatggtggatcgatcctgacttctttgagaaacaaagtgatggtgcattgaagttcctgccgattaacggagattatcgggtgacagctaatgctgttttgaagtatttttctgtaatggctttgaaagatggtaaaccggccaaattgcaagatgacggaacgggtgcaatctgggctatcggaaaaggaatcggtaagccttctgttacgtcttccgaagtaggttgggagccaagtaaagcgctctgtctggcgcaagttgcttctaaaaagtatcagctaaccttgaaagccggggaaacgttgaagactagtggtgacccggaagtgattagttttaagttcttccatcaaaatgattggggaggagaattcggcaattatgcaagctctattttagtggaacagcttaaacttgcagattccggaaatttggaaatgcaggataataaagcatttgaagaaggagctgtctatcgatttaccattgatgtaacgaatggcaatgcaaatgctgatctgaaggttgagaaaataaattgatctgaagattaatgccggatttttattgaaactatcctgaaagggtatgatgaattgtaccctttcaggattcatctttggtcggaataatgtaaaaaacattaataaactcgtccgcaactaggaaatatcccctgtttgggagtctatataaataaagtatgaacttatttcttatatcataaatgaacatgaaattcaaagcaatgttacttggcttgtctgtgataactgcgttgcctgcctttgcgcagaagcccgtgtatctggacactggtaagcctatcgaagagagagtgaaagatgcattgaaccggatgacccttgaagaaaaggtgaagatgattcatgcacagtctaaatttagttcggcaggcgttccccgcctcggaattcccgaagtatgggctaccgacggtcctcatggtatccgtccggaagtgttgtgggatgaatgggatcaggctggatggacaaacgattcctgtattgcctatccggcattgacgtgtctttctgctacatggaatcccgaaatgtcgcatctttatgggaaaagtatcggtgaagaggcgcgttaccgcaagaaagacatcttgttggggcccggtgtgaatatctaccgtactcccttgaacggacgtaacttcgagtatatgggagaagacccgtatctgtccgccactatggtggttccttacatcaaaggtgtacaagagaatggggtagctgcctgtgtgaagcattatgcattgaacaatcaggagttcaaccgtcataccaccaatgtgcaattgagtgatcgtgctctttatgaaatatacctgcctgcttttaaagcggctgttcaggaaggtggaacatggtcgattatgggctcttataatctttatcagggacagcacgcttgtcacaacaaacgtctgcttaaagatattcttcgtgatgaatggggttttgatggcgttgtagtgtccgactggggaggtgtgcacaacaccgaacaggctattcacaatggcatggacttggagtttggttcatggacgaacggactgtctgccggaacgagaaatgcgtatgataattattaccttgctttcccttacctgaaactgataaaagagggtaaagtaggaacaaaggaactggatgaaaaggttagtaatgtccttcgtctgattttccgtacttcaatggacccgcacaaaccatttggctctttaggttctcccgaacacgggcaagccggacgtcagattggagaagaagggattgtactgttgcagaacaacggtaacttattgcctatcgatttgaataaagctaagaaaatagccgttatcggtgaaaatgccattaagatgatgactgtgggcggtggtagttcttctttgaaagtgaaatatgaaatttctccattggatggactgaaaagtcgtgtgggctcaaaagcagaagtagtatatgcccgtgggtatgtaggcgacccgacaggagagtataacggtgtgaaaaccggtcaggacttgaaagataaccgttcggaagatgaattgcttgcagaagctttgcaagtggctaaagatgccgactatgtagtcttcttcggtggcttgaacaagagcaatcatcaggattgtgaagattcggaccgtgcttctttaggtttaccatacgcacaggatagagtgattagtgaactcgcaaaggtgaataaaaacctgatcgtggtcaatatctccggcaatgctgtggctatgccttgggtaaatgaagtgccggccattgtacaaggctggttcctgggttcggaagccggaacagctcttgcttccgtattggtaggagacgccaatccttcgggaaaacttcctttcaccttcccggcaaaactggaagatgtaggggctcataaattgggcgaatatccgggcaataaggaggaactggcacagtctaaacatagaggagatacgattaatgaaatctatcgggaagatatttttgtaggttaccgttgggcggataaagaaaaaatcaaaccgctgttcccgttcggacacggattgagctacactactttcgcttatggaaagccttcggctgacaagaaaacaatgacagtagatgatactatctctttcacggtcaatgtgaagaatacaggaactcgtgaaggtcaggaagttgttcagctttatatcagtgataagaaatcctctctccctcgtccggtaaaagagttgaaaggttttcagaaagtgaaactggctccgggagaagagaaggcggtaacgctgacgattgataagaaagcattgagcttcttcgatgatgctaaacacgaatgggtggccgaaccgggtaagtttgaggcaatcatcggtagttcatccagagatattaaaggtactgtaccatttgagttgaaataggtagatgtttggttagagatttttttaaggagatgacagaaagtctgggtactcggaaaacgctaagtgattgcaacaaatcgacttagcgtttttttattgcctaattttcccagcgtttgcaaaaaaatagtaagaaagtagtcgtttcgcttggtaaagtgttgtatcagaagtaattttgggaaaaataacaattaaggtaacctaattatggaaaaaggtatttggctggaaatagaggaactgtataaggagtttcagcaactcggtatcagtcagtcggtggactatgagaagtactacctctattctcttattacccattctacagccattgagggttctacactaaccgaaatggatgcacagcttcttttcgatgaaggtgtaacagctaaaggaaagccgttggtatatcatctgatgaatgaggacttgaagaaagcatacgagcttgctaaaaaggaagcgcaacgcaatactgttataactcctgcttttttgcagaagttaaacgctactttgatgcggacaacagggggaaggcataatacaataggcggctctttcgattcttccagaggtgagttccgtttgtgtggcgttacggctggtgtaggtgggcgttcttatgtgggttatcaaaaagtacctgttaaagtagaagaactttgtttcttgttgcaggaacggcaaaagaatgtggaaacgttccgtgaacaatacgaattaagttttaatgctcacctcaatttagtgactattcatccttgggtggatggcaacgggagagcagctcgcttattgatgaactatattcaattctgctatcatcttttccccgctaagatttttaaggaggatagggcagattatatcctttctttacaacaggcgcaagatgatgaaaccaaccagccttttttggatttcatggcggtgcaattgaaaaaatcactgtctttggaaattcaaaaatataaagcttctcacgataaaggatttagttttatgttttaatcttgtagggcttcttttgataagacttccacccattgtatattgtgttgtttttcattaacgaaatcaccattacagtaacggcggttgcatttattaatatcgaacttatgtaattctctaatagttttaaataaaggttcatcagtttcaccgttagctgaatagttatagaccagatatttatggtggaagaggtacataaaataataaagaatcatccttcacactcttcactgttctttttatatgccataagctaaagtaaatatgctataagcaaaaacgaatatgctatcagctaaaattaataagctcatagcaaacgctccatcaagtattaacatttgagctatcgactattaatactttgtatttaggctattaatacttgagttgttggctatatatacccaagacgcacgatatatatatccaacgtgttagatctatatgaccaatacattggatctatatgcccaacaaatagggtgtatagacccttaatctatacgatataagcgtcttttagtctggttatttgaaagaaagagaaacaatcttgttaatatctgctaaggagctatatcgataaaaagctatctaaacttgggggcttactagttcttcgttaacaatcttaaagcttataagaagtctctctttcgagtgcaaaactaaaagacgcttacttttattttgtgaaggaggtgaaggatgattctttattattttatgtacctctttcaccataaacatctgatttatactcattcaactaaaggtgaaaccggtgaacctcctaaatgaattttatagttacaagtagctttagaagattttgtcttttgctgatcgctgtaaacttcaatttatattgattttcttttctcttttctgattttatattctatctttgcaatgctctttatcaaaatccacagcaggggaacctgctgtatcaatgtggcaggcttttttatgcttgtcctatcattctatatggcggtttcgtacccccatgtaggatgttaatgcacctactgcctgttgtggatggtgaagagcaatgggacaggcggaaccgcttcttttatttcttaaaactacccttctgtatcgccccattgaacttaatttattcaccatttaattaaaattcttatggaagaagttttaagcaaccagcaggctcgtccgggggacgcgacgcaactcatgcacgttatcttttcatccgatgatgaaatgatgtctttttatctgactctcaatcgttttatgaatcctgaaagctatctagtggaacgaacagatcgaaagagactggaggatttagctagtacgctttgtagtaatgtggcagcctttgaagccatccgtaattataagtcgataagtgtgaaagaggtgattagaggattcggggcgcacatgatgaatacgctaatctccaataccaatcgtttccaaagtgccgatgccgtgggaacgttaatgaattgcatactgaataccactaaaaacagttggcagtttaagaaaatggatcggaataatgatatacatcttcaaaatgtacgctatttgttgagtcggctggatgcggcagaatctaatgaagagaagaactgtgaagaagtagcgatataaacagttttctctaaaaattacttaggaaacgcaaatagagggtataagaatcggagataatgtatagataaaggcaaatgtaacgtaacataaagcatctgtaacctgcccgatagaaaaggaacacaagacgttgtgctccttttttatattgttgtaactttgctttcagataatatgataaagctgattgttatgagaaacacactttttgggattctattcctttttattttgcctcttcaggcacatcagaaacttccgtatttgcagaaacagggaagtaccacacaacttatggtagatggaaagccattcttggtgattggcggtgaattgggaaattcttcagcttcctctattgaagatattgaacgtatattcccgaaattgcaacgtatggggctgaatacggtactggttcctgcatattgggatttaacagaaccacaggaaggtaaatttgattttactctgacggataaagtgattcaacaggctcgcgcgaatgatttgaaggtggttttcctttggttcggtgcgtggaaaaactcaatgagttgctacgctccgatctggtttaaggaagattataagaaatacccgcgtgcctatacgaaagcagggaagcccctcgaaatagccagttccttttcggagaatgtgtttcaggcggatagccgtgctttttcccaatggatgaaacacattgcttctgtggataaggaagagggaacggttatcatgattcagatagaaaacgaaatcggaatgttggaagatgcccgcgattattccaaagaagcggataaactgttttatgcaccagttccgtctcttttcatcgactatttgcaaaagaacaagagatctctgcatcccgaaatgttggcaaaatgggagagccagggattcaagaagaaaggtacgtggcaggaagtgtttggtgcagacgtgtatacggatgaaatttttatggcctggtcgtatgcgcagtatgtagaacgaatggcaaagttagcacgttctatctataatattccgttgtatgtcaatgcagcaatgaacagtagggggcggaaaccgggagaatatccgtcggcaggaccattggctcatttaatagatgtatggcattatgcagcacccaacattgattttctggctccggatttatatgataaaggtttcgttgattgggtggcaaagtataaactgcacaataatcctctctttatacctgaaattcggttggaagacaatgatggagtacgtgctttctatgtgtttggtgagcatgatgcgattggcttttgtcctttctctattgaaagcggttcggatagagcagatgcacctttggtacagagctatattaaattgaaagaactgatgcctttattgacaaaatatcagggtaaaggagtgatgaacggtcttttgtttgatgaagagaataaagaacgaatactttcatacgatgatttggagattacctgccgtcattacttcactctgccatgggacccacgtgcccgggatggcactgtatggcctgaagggggaggtgttttgctgcgtctggctccagatgagtatatcgttgccggcagtggcttggtacttgaatttaagaaacagggggaaaataaaatgaaaagttcaccggcattgggcgaggatggttttgccagtgtgggcggaaaggcatcaaaaacggaaaatagctggcaaggtggtatgagagccggtatcggttctgtagatgaagttaatgtgaacgaagatggttcactgaaatatatccggcgcctgaatggcgatcaggaccatcagggaaggcatgtacgtattcctgtcggagaattcagtattttacacgtcaaactgtacgagtataaataatgtgacgacatggtgcacctttgttggctacatacgtatagaagagtggagtcattacttgcctagtaccaacagactttccggtcccatattgaacaacaggtctatgatactcaaattaggaagaaaacccagtttgggctcgaaaacctgatagtaaggttgcggaataaactctgtatccacttctcggaaatcctttttgggatgaatgacttcccgaaaatcgaattctccgggagcaaactccatcttatattcgctagtacgctccatagtggggtgaatatctatcaattcacagaccatccggcatagttcttcgttgaaatcgattaaaaactcgtatttcttttcgtagaagggacggaagtcgtccttgtaatattcaaagaaaggagtactgttgtaggctgattcgatggcgttccagtgcagatgtctccagttgccgtggtcggagatgcggatatctttcatcggacacttcaatgtgtcgggttttacggttgggatagaaagagctaattcgccggatgggccggcaatggtgcaccggttacgataggtttgtttgatatagtggtcgtgttgctctacaaacactttgtcataagccagaagtttggtataatattcgacgggagcgagataagctgaagataaataagctattttcatttctttcattttaatacgtttagggggctctataataaggatattaattaaggatattattaaggagttatttcttttatgttccggaagattatttcaccgttctgaagaaacggttccatcggtatccgtcaaacaagcctgtctctttttctttggagaaccaaatgatggaggctttcccgatgatatggtcttgcgggacaaacccgaagagccgtgagtcggaaaagttgacggtattgttagatcccatccaatagtaatctttagtgaaataacagtgttgtgtaggtttgccgtctacgtagagagtgtcgttctttatttctgcctgtttgccttcgtgcatcacgagggtattccgcagtaaggttatgttccagggatagacccggataaatttcccttttccgggaacaatcagcggattcggttcggcatcttccctgtttgacaaaggttggacaaaactctctttcccattcattgcctgttccaacaaataatattcgtaacggctgaaactacgcacatgagtactgtcattacttcccatcaatccgtcgttggtgatggaaagagtatgcatgagtgaggtaatcagattttcttttgacgcggggtacgaataaagccttttcttatccggattgaattgtgcctctggagaaataacggagaaaagagaatcgaccaataatgtatctcccggaactccgaggcaacggctgatatagatttcccggcggtcgatgataggttcccggattccagccggattattgaacactacaatatcttgttgccgtacaggactttcacaccaacgatgataagaaaagagcgacatgaaaggaactcgcaatccgtaactccatttgttcactaagatacgttcaccctggaaaatggagttttccataccggtggaagggataaggcaggacgtaaaagcaaatccccggagcagaagcactacgactactgctccggcaaatgctagtatccatttgaatttacgaatgttcatcaatatttatcaccttatcactctattctatccgtacacttatcagtctacccacttgaagaggcggttccagcgaatcttaccgtcaaaccatccacggtctttgtcaagcgacagccatacgacaatcggcttgcccactacgtgatcttcgggtacaaaaccccaataacgggagtcggcagagttgtgacggttgtcacccatcatccagtaataatccattttgaaggtatattcattggtcttttcaccgttgatgtagataccgtccggtttcacttccagcttgttgccttcgtaggctacgatgcaacgctcatagataggcaggttgtcttctgtgagggtaatggtagctcctttggcaggaatccagatcggaccgtaattgttgcggttccatttggtataaaggttcagcggatacatctgtccggcgtattcttccggttccattactattttgctgattagctttttattgccaaggagagtgtcatacatctttttagtcaatggaagatgatataccggattcagtttgccttgcgcattccggttgtccagtcccatatccaataatccgccttcccagccagagtcttctatcagcatggtgtcatccttgctgatgcctaattcgcggagcatatcttccggaatgtacgggccggtagtctgtacgaagtagttgaattgcaggttttcggggttctcaatcgccttaccgtcaatcatcacctgtccgtctacaatttgcaatgtatcaccgggcaagccgacacaacgtttcacataattctcgcgacggtctaccggacgccacagtacttcaccgtaagtacgcggattgtttagaatctgtttacgtccggcgtcatagtagaggtcatagattgcacgttgctgtgaacgtgtcaggctatccatttcaatctgtttggagtagatgcgttgtccttcaccataagccagcgtatagaagtccgttgtctgttggtagttcactgccaccgtatctcctgccgggaagttgaaaaccacaatgtcattcagcttcactttgccgaagcccggtacccgtttgtatttccattgtggccactcgatatacgatttagtattgaagacaggcagcgtatgttgtgccaacggcatagaaaggggagtgttcggtacgcggggaccgtagctcatcttgcttacatacaggaaatcgcctaccagcaatgatttttccagcgaagaggaaggaatctggtaattctggaagatgtagatattgacgaagtagacggcaaccaacgcaaatacgatggcatccacccaactcatcacactgcggacagccggattcttcgacttcttccaaaaagaccaaggtattttctttgtgatataaatatcgaaaatgaaaggaacaacaatcaatccccaccaactccgtacccagaggaggaagacgaggtaaagtagaatagcaatggcacatttgatccattgtgcgcgtgtggcttgtctcataatgttatatttgtttagaactagcttctgaaatcttagtcgttcaagaatgggaataaatcactcatgcccaaaaaaccttcgtgtgtggcagtatattcggctgccagtacggctcccaatacaaatccaccacgacttttggcatcatgcgtgatagttatgctgtctacatcagattcatagcgaatggtatgaaggccgaacacttctccttcgcggatagaggcgataggaagttcattaggggcgcaatcgttggttccgctaatggttccgtccggtgcaaggaaagtgcctttcacccatttgtccttacggtccagcttttccagaataccttccgccaatgtaatggctgttccgctgggagcatccagtttgtggatatgatgtgtctcgctcatggtgacatcataagcagggaactgattcatgattttagccagatacttgttgacagcagagaaaatgctgactcccagactgaagttggacgaccagaacagtgttttgcctccttcagtgcagagctttttgatttcttcgccatgctcggccatccatccggtactgcccgataccagtttcacatcggctttgaatgctttcatataattgctgtaagctaccatcggattggtaaactcaatggccacatcggccgatttgaatgcttccgattcgaagtcatcctgattattgatgtcaatgatgcagacgatttcatgtccgcgactacgggcaaccttttctatctctttgcccatctttccgtaaccgatcagtgctattttcattgttttctgacttatattcaaaataatagtcgcaaagataagatttttattacatttgcagcgcacattaacgtcttgttaacatggaacatcttctccactacgtgtggaagcataaattatttcccctgaaagtactgcaaaccaccaacggcttaccggtagaagtgattgactccggtctgcaaaatcccaacgccggtcccgacttttttaacgcgaaactaaagattgatggtgccttatgggtagggaatatagaaatacatacacattcttccgactggtttcgccacggacatcattctgacaaagcatacgactctgtgattctccatgtagtgagtgaagcagatacggaaataacccgtaccaacggtgaacagataccgcaactattacttacctgtccggacaatgtgcaattacattaccacgaactttgtgtagccgatcagtatccggcttgccatcccatccttgcctctcttcccaaacttaccattcattcttggctgaccgctttgcaaacggaacgtttggagcagaaagcgcaattaatcacacagcgtctcaaacattgtaacagtaattgggaagatgcattctttatcacccttgcccgtaatttcggttttggcttgaacggagatgcttttgaaacgtgggcgggactgttgccgtttcgtgcgatggataagcaccggaatgatttgtttcagatagaggcttttttctatggtttggcgggattgttggaagaaacgtttctgaaaaaggaacaggaagacgagtatagtctccgtctttgtaaggagttccgttatttgcagcggaagtttgaaatcaggcaggggatggacgctacgttatggcgttttctacggcttcgtccggaaaactttccgcatattcgcttggcgcaattagcttatctctatcagaaaggggataagttgttttcacgtttgttggaagcggaaactctggtggatgtgagaaacttactggatgcccgtacgtctccctattgggaaaatcattatttattcgggcgaccatcttcacaaaaggagaagacgatgggagagcgttccaaggatttgattatcattaatacagtggttccttttctttatacatacggtctgcataaggcagatgaacgaatgtgtgaacgtgccggacgttttctggaagaattgaaggcggagagtaatcatattatccgctcgtggagcgatgccgggcttccggttgtcagtgcggcggatagtcaggcattgatacagttgcaaaaagagtactgtgataagcgaaagtgtctgtactgtcgcttcggttatgaatatttgaggaaaaagtagcttcgaaaaaaaggctttggtcgatgaaatatgtataattttaccacgttagtgtatttttctatgtatacgtttttttattttatcactatctttacattgtgcaataaacaaaacatcttatagaaagaacaatattatgaataaaattattagccttttcattgctgtattttttaatgtatatacttctgctcagataaatgcaggaagtaccaaagaatctttaatgactcttgacgagatgccatcatggattttaagtaatattcaatttcctcaagaagcgtacaaatatggaatagctggcattgaacaagtttgtattagtgcatcttgggatggaaaagttttcataacaagcatactgaatacattaaatcctgcttttgagaaagaaattatggatgtcataagtaaagctcctcgatgtcgatataatggaagtcaacctaaagatatatataaatatatgctaattgattttcatcaatatattcctgaagataaacgggaacaaatacaacaagtaactatgcatattccaccgcgtttatcgaatattcctacgagtccttttaatagcagggacaagtttgttcaatggatacacaacaatattcaaataccatcaacactgaaatgttattcagatacattactttttcagtatacaataactaaaaaaggaaaggtaaataatatatctatattacagtgtaagaatgatattgtaaaatgtgcgatagaggatttattaaaaaaatctcctaaatgggaaccggccattgctgatagaacaactccaattgatgttactatatgtgataagattattataaaaaccgataatgatggaatgcttttgccattaatagtgtatcgtgatgatgttttttgtaatacaagaagcaaaccaactgatccggatatgatcgtttttaatccagaaataaaggcaaaatacaatgaagagggtaatttcttgaaaaatattatgtgtgatgttatagttgataaaaaaatggttctgaatggctcgtttgttatagaaaaggatggtacgactagtcatatagaaatttcaaacagtccggacgcggaaactgatagtattgtaacagaagctatcgctcgaacaaaatggatcgctgcgatgcaaggagaaagcgcagtacgaacgatttattcatttggggtaaataagcaaccgcgaaaacaaaatcaatccagtaagtattcttattatgatattttcggtaaatattttatagccctccaagctaatccgatgcgtacgtcatatagattcattcagggggatggaacgatacagaactatccatttaataatcaaggactgtttgactataaggcttattaccaaggaatgttatattactacaaaaatatggccggaaagaatagtaatatttcaagagattattttgataaactctataaaatgtatgcgggatattaaaagaaaagatttgtgcaaaaagacaatttcaaggaaaaaaatttagttcccaatattagatattgcggtctctatcaaggaagccaaagtctgcttatagactttcttcagtaatctaatgggttacagatggcagatgtgtgatagctgacttgtactgtggtagatacttattgtgttttctttatattcttttctttatgaagaaactctaaaatttcagcttccattcgtaaagcttttgttccttttttctttatcggttgttttaaaagataatttcccatgtcgatggctgcatttatatttcctttgtctatataaagctggaataatttgtacgaaggagtgatatgatgtggaatcatggcagcagccgtttgatagcatgcttcagcttgagcgtaatctcttttttgtttccaaaaatctcccatcttgatatatagttcactattaggagcaattcgggcagctgtttgtaatatttgtggttttgtatttaaaggataatcttccaaactactttttgagtagatgtacattaactgtggattataacaaaataatgggtataatgtggatagttgagaatgggcttcttcggatattttatttttatccactatcctgataattgtggtaaaagttttatggtaaatatgataggaccagattgatatacatataatagagatggaggctatacttctaacgatgtattttgctaaaatagatattgtaaacacttttatggttttgcttttcatcattcctattatgctgatgaataatatttctaatggaaaaacctggccaggataagaaaaaaaagagaagactaggaaagtggttaaggcggatttcagacaatggtcagtattattcttttctttataactaaataatgcataaaacaaccatgaaacaacaactaatccaactattccctgttctgctgttatatataaaaattcgttgtatgtataaaaaatgttgtcagctaataatgtgtatggagaatttgtagcttgtaagaaatattcagcttggtaaagcatgtaattagcttgccatcctccggtcccaataccgaatagaggataatcttctatcatctttattgtgttataccatattagcaatcggccatctgccgaatctcttcttataaagtagattgatatgataaaaacggtgatgataagcagaaaacctgatttcaaaagagttggtttgactttgattgtatgttttctttttaaccattgccataggaatatcatgcttcctaccaatgcagctgtccacccggcgcgtgaaccagataatagtaaaccatataaaataaaacaggctatcatgcaaaatgataatgttaatatacgatgcttgttttgtatgttttcataaatgaaaaaaatagatactatccagcatactgctaataatccgcctaatggtcctggatttccaaacgttcctgtgattccgaaatcatgatgattgctctctaaataattcactttttgaagtgttgaaatgattacttcggtaattccccaaatacagactatgtataataggcaatagcactgtcgttttggcataatgcgtatacacgtatatataaggcataatacagtcactcgccaaattgatgagtagtcaataggtacagctctatttaagaacagtaatatgcaaattgatataagtaatatatcttgtattctgatgttttcaatagaatagcttttcatactgtttataaggtacatttaatttaagtggaaatatatttatatatgatttatcctaaagatgagcaatgtgtaatctaaattttccagcactcttggttttgttttacacaaagaatgctggaaaataataattttcataatcgatcggcactaatttttacagaactgtaccgtataataataaaacttcttaatctatatataaattcttctcatatcttttagaagttagttttcctgttttttcatcattagaatatgttgaaagaaacaaatgtgcccttactacattattggctgggatagaatccaaaggataggagagttctattcttccttttggagataaactcttgtgtaatatccatttcccgctttcaagagtaaatagacaaatcgtcaaatccgcgcttttcccattagaagattctgttaaaacaatatagcttccactaaattcacttaaccgcccttgattcataactaaaatttctttgtctgtattattagtaagtataagggttaaagaattattcggtttatcataagaaaattcaatttttacttcttgggcggtacaaaaaatagaaatgcccaaaagtacaatacctataaataaatgtttacttgttatcatttaatttgttttatgggtaaatcatttttatatcttttgctaactaattttcctgtcttcctatctctaaaatatgtggagaggaataatctagctcttgtaacattatttgcagggatagcttcaaatgaataaaaaagttctagtctttcgttagggtttattgttttagaacggatccactgtccatcttcatagtcatataacgagatgattagatcactctgtccattatcatgtttttcagttaaaataatgcagcttccagatgattcattcaataggctttgattcaatactattatttctttatccgtattattgaaaagttttagaatcaaagcattgtcttgtctattataagcaaaagtaatttctaaatcctgtgtttgtcccttgctaggaattgacatacacaataatatacttataaaaaaagatttaattgtattcataattttatttatttgatgattgttctgtagcaattattagaagttgttcataagtccattctaaccaagttctttcattctcataataatgtgatacctctggaaagttttcgcgttctgctttatgcgtctctaattcatttttataatattctattgttccatagcgatcaatgattaattcttgcttaaaatcagcttctcttgtttcgggagtcattatatatttgccatacattatatctaatctttcattcaatatcttttcaatatatggtggaggatttaggacaattgttttttcgagaatagtcatttcaagttttccataatgcttatggtcaatatggtacatctcatgccatattgtggctattctatctatttctgttaaattatctgagctaaaaaataattgacatagttgaagaactccatccttgcttgtacgtgcagttgaacgacaatagttttgtttttcaattgtgtatttcgttcgatcaatattcttaagcttttctagttggattaaaaggctatttactgcttttttttcagctgtagataaaggaatagatttttcatcagaattctggtcaccattattattttctgtcacagtatcatcttccgtactcgtcgattccggttctgtcggttcggggtctattgttccactatcgggaggtgctatgatttcccattcatcgtttccgccacttgtttcattattatttgattctggagtaattatgacttcttcaagtgtctcaccaatataagtgtaatcatcttcattaccataatcataatcgtagttatagtcatcttctccacgcgttaagaccatctttttcttttgaatatatacagtagatgctaatgcgcgagcctgctcatacttatctgataaattagttttccctgaagcatttaatagaaatacccctctcgtttttactccgttcttaaaagtacttatacgagctgtaacttgtgaatatacacaggaatataatgctactcctgtaaaaccacccttgtctgcacaatttataaagttgttacaagtttgtgcaccatttctactatcatataatttggagggtatcaaagttaagatgtattgatccattctattgctctttacatcttttactatcactagtttctgatatacattgacttttcctgcagaaggcttgccatttctttcatctacataaattgctttaaagtgataagtcggagttataggaatatcatagcaagcgagtccgttgttggtagaactgactgctgcatcccagttaggtacgaaatcaccgggggaaactgttttattccttttgttatccaatgaacgacttaatgttaaattagcatgagcttgagtttgaaaaaagtttttagcttcttgcaaactaaaatctttcatgtcagtctgtaaacctgattctagcaaatcttcatctttgcaatttactatactaatgacaattgcaattacacataaaacagtataaatataagttgattttttcataaaataatcattttaatccttttcttttcatttttctttcaaaatcgtatttccaccaaccataccattttttataattatcaaccttgaataaaggatttactgtcttacagaaggtttcacctaattgggagagttggtcgtatttatcgctatcagacagttttttctgattgagaatcttatattcttcaattgcatacttattataagctgtcttgaatttgtttatttgctcctgatttagcccatatcttgatttcaaagtatgatctaatgctgcattatttacttttttccactttacagaaacagacggaacagtctttgctattttttttgccatctcatcatcaatagccatcagttccacttccctttcggcattttttttattgctattgagtatgtttgcacgtttttgtttatacgtatcttctatttttgctatggtaaaggcatctttgtatgtaactccatatttgtccatattgtcaagtgctctgaagaacagtctcttatattcgatataccaagtcccattttcagttcctaatatttgttttattttaatatttagctcggataccatagtatcactattttcatatttttcccatgcttctccagtatctttatgcattttatctcgttctttgacccattccgattcggccttatacaaagcacgcattttttcatatggaataaatttgttttcacttagtatttggtaacgttccatttcttgggtacaagagctccattttttatgttttcctccagaaaatgcttggctgattattgtaccatattttttataaagctttttttgttccgctttaaattgagtagagctaattttccgattctttagctggtcattctctttctgtaaggagaatagaatttgttcgtattcatctgccttttgactattgattttatacgttctcatcatatattccttgcgtttaccgatgtttacgcccggaataatttgtgaaaagcccacacttcctattaaaagtaaggacaaaaacaaagtaatttttttcataattttattatttaatagttagaaataattttaccaccatatctgtttcccattttcataagtgaatggacgttcttcacggcctttagtcaaattgcgcaaccataacagagctttttgaggtacgttatcataaacgacactatcacctattggtcgtttccggcctaaacttatccattgatcctgccaataaaacagttcataagtgtctgttgaaactattgcattatcgtcattacgtggagcaaatccaatttttgaaatcttcacaggtttatataaatccacaccaacccataagtctatgccaccactcacttgataataggtaagtggttgtccatcgaaaatattaagcatagtactgtcttcgtatatagcatcacaagctatagggtggaatggtagaagcttttcatcagattgatataaacaaaattctgcgatactaaaggtcccttttggttttctataacgtatgtaacgataggctttctctgcagatatttctatcttttgcattttgctttccggagtttttgttattttataaagttccgttgcatcagaaaagtctgctttatttgccccttcaaaaactcccataatcatcaattttgagaaatcaacaattcgcatattcaaagggaatttgcgtttacatactactctttcaagatgtttagtgtctggttttatttcccttactgaatcctccgatactattattgggctgcctattggactggcctcttcatttacccagtgagttgggagataaactatgccatcacctaaatcaatagcttccttattacgatcaacattgtatatatttccagtcccaatgtgatggaatgtttgagaagaggaaaaagcaacaggtacccatctttttggggaaaatacagataaaaaattttctttttctttatttatattagtcgagactgtaacatcacaagagccgatgttgtgcaattttgtaacatccagtaggtcattgtgacgaaataattcgggaatattgtcgatgtgtttggctaaatcttgtattgaatacatcttacgatatattttaggagttttacgtgataggtaataatctccgtttgcttgtttgtctgtgttttgtaatggatatattttattgtctggtaatataattgaaacaaaagaatgtccattgttattgcttccccaataaggtacaaattcaaatgcggcaggaattcctactgaccgtaaggccatagtaactaatgctgttctatcatcacatttaccatatcctgtctttattattgatgaatatgattttaatgtatctttgtaaaattcgggagatagctctattttaatttgagcatttatattctgtgctgtttgaataatatcgttggtacattgtttctcaaattttctactacagtcccatttccaataatattgtaatgattcatcagcgactctgtatggtaagatgtattcgcagaactgttcgaatgtataatttttcaaataaggactcttttcttttaaaaagaatgaatgctctagtgattttatgagagagtcagcttttactatatcaatatcatatattttctgttctttgccattgatggaatatttgttaggcatattttctatcagaaagcaagcagctttatatttatctttgtccttatttgttttataatgttctaaaaagcgagtaagttcctttttatttgtttgagaattgtttgctatttcccatgctagtttttcactggatgaagtacaactgagtaacaagagaagtaaaaatacggtgtaaattgttttcatagtattataatgttaaagtgtattctttgtttgtatgttgttacaaaggtgaggagaaataagtatttaggtatgagtaaatggtacattagtaggatgaaaacgtacattatttgaccgtagacgaatggaatcggatatttctttaaaatcttttatttagaacgtaataacgaagtttcttttgtgccttgatttgaaccaattttaatgtataaaagtattgcaaaaccaaacttgttactatctttgcgccgtcaattaaactattaatttatatagtgttatgagagctaaaaagtttgtatgctgcttgctggctatgatgctgctcgcaggtgtttcgtttatctcctgcggtaatagttccaaggcaaaagccgatagtgaactgactacacaagacggtgaagatttcaaatcctttctggataaatttacttccagtgcagccttccagtatactcgtatcaagttcccattaaagactccgatcactttgttggcagatgacggagaaaccgagaaaacattccctttcactcgggaaaagtggccgttgctggatagcgaaaccatgaaggaagaacgtatcacccaggaagagggaggtatttatgtttccaagtttacgttgaatgaaccgaagcataaaatctttgaggcaggctatgaagaatccgaggttgatttgcgtgtcgagttcgagttgcagtcggacgggaaatggtatgtggtagattgctatacaggttggtatggatatgacttgccgattggagagttaaagcagactattcagaatgtgaaagaagaaaatgccgcattcaaagaaatacatccttagaaaggagaaataagtattaagtatcaagtgttgagtattagccagtcatttgatgttaatacttaatatttgatacttgatacatgatatcgattacggttctccgacataatatcccagttcagattcttttccatccaccatctctctgacaataccatttttggtgttgaactcttgatagagttcttcataatcacgtgtatagtctgcatcggggactacgttaacatcaaatttaagttcggctctcccgtcggggagcatattgccgaaaatccggatgcggtgaaccacttcgcctacattcttgatgctgttgtaggttgctttgaattgcctgataccgtcttcgggaatgatgatatgcgaacttttatccagaatgatacagccacaggaaggttgcatttctgaaatgattaacggagcgtctcccgtgttggtgatggtaaacatgatatcgagttgctgaccttgcttgatagggtaatagtgcctgacggaatcttttatcgtcatgctggtgggacgtacttcctttctgcaccctgtaaagtagagcggaagtgccgtcagtagtaaaatatagaatatagatttattcattgttgccatttatttttgttatatcactttttcagcatttaagggatgaatgcaatttcatcgatacccatttgcgttcccggcttctttaaacaactgatttttatgcttaattgttctgttccgttcaagtctgccggaacggtggctttcatcatttctcctttttctggggagtcttccggtttcaggtctattgttttataggctactccgtctttcaacagttgaacttgctgtggagcatagatgcgatggcggggaagattcaaaaaactgatatagaatgttcctgatgcattgagtcctttaaccggcaggttgatggtacattcttctcccggaatgataacccaaccgcaatgatagtctccgggtaaaccgtgagtgccatcggtcagtttctttgaatcatttttatttagtttaggggttgcggaaggatgcattcccagaaacaaacttttctttatgtcggaagcaagtatatattgttcccattcctttatataatagtcaatctcataagctgactcattataatatcccattccggcaaatgcttgatgctctttgagctgggtgacccatttacgagcttggggaagcggttgaatatcctttccattccgcttggcatatccgtaagcgtcgaaactgtggtcacgtgctaattccatgcgcgtgaaagacaaggcggtctggagctcgtgcagctttttgcgctctttcccttttgcttcggatacaaaatctcccatttcatcatagaatttgataaacttctccggatagaggaatcctttttccgattctctgataccggcgtaaagtccgagccgctttccggattgggcgttgttttctagctctgtgtagtaatcgtacagccattttttggataccgggtattcctgattgaaatagcttttaattaactcatcaaccggaagctccgggttgataagaagggctgataatacaaaagtcctcatttcatcgaaggaagaatagctgtaaccgcttccgttgaaaaatatgccgctggctccgtgttgtttgaaaagttggagtctttgctgggctatctttaatatggggaaaggagtgaggtagtcgtcgaagttgttgatatagtcccatatatagatgttgttcgttactttcttccagttgtcgagttgttccgcaaatttcttgtcttgctcgtccttgccgtctgtccggcggagcgggtagtcgatagcgctgacaattaccccgacgttaggcgggagctgcttgtctgtgacttgttgcgtagtcaggtaggaagtcgtaaagaacgtgtgtttgggaaaacgctgcgacaggcggaggatcagttccgtaacggcgggagttgcgttcttctctgtatttcccaatgcggtgcaggtggcacacgtacaggcgtacggagtatcatccggtgcgattacaaaacggaaattccccttttcaccgaagttatctacgatgtaactttctatctggcgatacatatcctcggaagagaaacacagttgtgagtcatctgtcttcccgtgaatggtggcatatactttctctgcatcttttcccaagacttttcgcaggttgtgtccccatattccccagctgtcgtcaaagttgtccaggccgataacgcctgtatgatcggcgttcaggccgtatggagaataaatactttgatagtcaaatgcaaaagctccgcaagtatcgttgagattgataagggcgggaggaagatccgaaccgtctatacgcgggtcttctttgctgatcttctttatcagttggtattgcagccataacatttgtttgtcgtcacttgcggtcagtctgatatcagagcctttgcaggctactttgaatcctctctgcaatgttgggtctatctgtatgatgatgcgccacatgtccatttcggaaacgccaaaagctactatttcatcgtcgtttgcacgcttcttgagatgttcgtacaggtatttcgcccaccgggtgtctctgtcggtcggatcctcaccaatggtgacgagatacccttctttagatgggaacatctccgtgcgtgcctgcatacggcagccggataaaaggcagcaaatacatatcattcctgccaatacagggccaagcgtatcagaatgaaatataaacttgtgcataaatgttatataagtttttatagcgtgtcgatatggattctatctggttggacggacttgtccctcgcaccgtattggtttggttataataggtgttccaggtacccatcaagcctatggtaatgttaggactgaccatatactggcctcccaatcccaccatggtattggtgtgggagaaagagccgggtagtgcatagtccagtacggccgtttccggtgccgatccgatgcttgccatagcgttgatattcgtctttccgtcattagccgggaagtatttggcgccaatctgagcattgtaatagaagttggagttgaagaaatgcatgtccagcttcgtgttgaggcgaacgacttcgatggttttggctaattctccgcctacagtgagcagattggtctttgattcattccaaccggtaaatagataaccgttatctccggtgccccctgcaaagaattcatcgttccattcataacgctttgtgtaagcggctacgcgtctataacccacatgtgcgcctatttcccaatcattcttgagataatgccgtaaagcgacatcagccgttatgtccgggaagtatttggtcgcaaaggctgcattggccgtgaggctccacttcggtgagaagtgatgcgtccactcaccttgtacctgaatgccgactcctcccggtgtctgttcttcagcctccatgctgtcgcttgccgagccgcttcgtcctgcatagttgagacgtcccgtgtagctgttcttctggccttttcgagtgtattcagcggtggcaacggaggtaatgatgtcttcttctccgtagcgtgcacgcaggtaggtcaaagcaatctcattcttgagcatcatgcttctaaggcccgataagtgtcgttggaaagagcgatattccatgatggatggctcgtagtacttttggtaataataggctgaatccgcttgacggttggcttcatataccactcccttggtgtacttcaatgatttgttctgactgtcgtaaagcaaagctgtatcaagaacagcgagagccttttccggttctttcgcctttgtcagttgcagggcacgatattcactgctttgtgagaatgcgcctataatctctttgttactcgggtatttattgagtatcggtttcaggaattccaaagaagcttcgtatctcttgtcacgctcaaggacagtagccctctttgcctgatagaacggttcttcaggataataattgatcccttgagccgtatatttctcgaattcatcgtattttccgagtaaaccggacgaattgatggcataccgtaatccgagatcgctcgatggattcaggctaattagcttaacagattcctcgtatgctttcttcgtagctccggcttccatacatttcttgatgtacggcactgctagttcctcgtatccgataacatagaaaatgcgcatatcctcatcgctctgctcgatggcagatagatacagttgcaaagcctcttcggttttatccattttatcgagaataaatgcccttttcaacgtgccgttttcgtaatcagggaagtgaagagtgatggtgtccaatgtggcaagtgcttcattgtaacgtttcatattgatatagcaactcaaggctttttcccatgcggcaccgttcacttcattgtcgtctacatgtttttgagaaacgaacaatacgtgcggcaatgcttctgcgtacagaccaagttccatcagtttttcagctttcttcatgtgttgtgcgctcatggcaagcgtaatatcataatcatcaggatacatctcatacatctttttcagcgttgaataggcaagatcatcctcattcatctggcgataaagcatatattctttataaagaattcctttatcattgttgccatattgttttttagcttctctgatatagaagagtgcgtcatcggtatatccccgggtgacggaagtgttcagcaggtagtctaatgcttccttgttcttattacctccttcgtaggccatgccatataatacataaggatcccgctgcttctctgctcgggcagcttccatcaataagtcgttgtacatacgccgtatggcaggactgttgtttcttcgcatttgctcgcgtataaacaccagagcttccggataacgtgccaattcactaaggatactcgcccttttgacgataagcgcaccgcttcccggtatggcagccaaaccgttggatgaccagcctagagcagcttcccggtttccttcctgtaaatgcaggttaatgatgtccagataatattcttcgttttgaggagatactttgatgagctccgtcagcttttcgatagcctcttttcggttaccgccttttttcatttgctggtagcctacctccatgctgtagatataatccttccttagaatggtatcgttcgggtaaatctgattgattcgtttcaacagacgatctgcttccacatcgttgttctgcttgcggtacagttcaatctttcttcgccataaacctctccaatacggattcacttccagcaactcattaacgtaacaaatagcactggagtaattttcggtgatatcttccacgtctaccagcaggtgtttggcattgacgttgttataattgtcgtctattgctttaacaagatgataacgcgactggtcataattcttttcgtgaaaccagtatttgcccatgagccattcaaggtcagaaacattcgggtatttctgaaggccctcctccaacagctctttccctgcttcccattcctcgttcgcaaaatgctcctgtacaatctgggcatattgctccggtgtctggaatccgttgtcggtcccggaggaagaggttatcagtaaaaacagacaacctaatatggtgatcttatggagaaattctctgttcattctatcttgtctttaatctttctttcttgtttaaatcgtagcaggttcgggcttcattgccgttatatcagtaccgtctgcactttcttctttctgcttgaatcccttacgttccatgtttttccacttgaagtctctattggtcagataactgaggtatcctctcaatgaacagaaagtgatgatgggatgatagaagataggctctaatatggatgcaatgataatccacaggtattcatatcctcttttatatagcatcccgacatagtagtcgtaggtaataacaacgatggaaaggaactggcagaacgtatagatcgtcaggtaaatcatccatgccgtgttccagttgactgctcctgtaaaggccagatagataaatactatcaaaccgacgagctcgatgatcggcgctagaaactcaaaaacgaacatataaggcagagttaacagtcccatctgtttatacgtctttttgaaaatcatcttacgatggatattaagtgtctggaacaatccccgtgcccaacgggtacgttgccggtaaagcattgccaggttgggaggtccttccgtccaacaacaagtatcaggaatctgtacgatcttataaggacgggagaagtcgcacatatatcctaccatgcgggtgatgaggtccatgtcttcggcaaaagagggagcatcgtatcctccggctgcaatcgctaccgaacgatcgaaaagaccgaatccaccggaaacattcggcataccattgatagcggaccatcccatcttaccaatcagataagagcgcatatattccagattctggaaaagtggaatcggtgtacggggagttctaacgtctatgatttgtccgtctttcacgacgcatccgttagccatcaacatcgttccgctgactgcaattacttgtttttctgaagatataatgggcgagatacaacgataaagagcatacttttccaaaatgcaatccacatccgtgcagataaaataaggatgagaagcaacgttgatacccgcattggatgcatccgctttggttcctccattttctttgtctacaacgatgagtcggctgtatttcgggttggaggatttgaggagtcttcggaacggtctggttttgattcgctcgatataagcatagggcacttctaccagttcataatattcggtcatcttttccaatgtactgtccgtacttccatcatttacaataaccacctcgaaaagcggatattccaatgcaagcatggagttcacattatcaatgattgtcttttcttcattgaaggcaggagcaattaccgaaatgcccggtgtatagggggattccttgattgttttccgcatatagctttccacatagtaatcctttctccgttttagagaaatgaaagagaggaaggcgaatgtgacgaagaatatcgccagcatgctcgtataaaagaatacgaaataattgaagaatgtaaatattatatctctcatgttctctagtttaactggttgattaacggatgcttggtgtgggcaaacaatatagctgtgtgggaatctgcttttctttccaattgatcgaatgttttccttcccattgcactatactcatagagggctttgagtatgactctcttggttccccagttatctgcttcatcataagcattgtaaagaaatcctaaagccttatcggtctttagatccgcaatagccgaaatgatttgtcgtttgacttcttccggttgtacattatacatttcaatcagcttaggttcaacctctttgtattttagtttacctaaagtcttgatcgcttcacctcgtatttccacagaacgggcattgagttgcttcgcgagaattggggcactttcggtttcattatatagccggatttcgttgataaagaatatcttaacgttttcttcagctgaagtattcacccatttaataaaggtgggtgtgttatatcccactttcttacggtgctccaagatagcgtgtaactccatcatgtcccattgccttaacttcatgccgatgtcttcgtcgaagaagcggaacgggtcaccctggcttaaccacatataagtatagcgtgccgagtttcttagttctagttcacgatgatagaggaaacgcaccaataccgcttcagaggcatagccattgatggactgaataagtttcagagcttgtatctttgatcttttggaaccgaattgaagttcgcgttcaaggaaacgtgtgatttggaatacggtttgaatcgtttgatagtttagttcattgatctcatcttcatgcacactcttgatttctgttaatagttgagtgataatgcgtaactcgttaggtttcgggcgctttttcgtatcatattctaatctgtcagctatctcttcttcactcaatgtgttggaatctagtgagatagatttcatttcttcataatacttatcaaatgctttattgtatttccgcttctcttttcgccttttaaatataccatatataatatggaataggagaaataagtacgcaataatacaaaacattacagcaattgagcatattcttatgattaaaggatagccaataaacttgtaatatatccaatagaaataatattctatgtaatctataccatacagtacttgatccatttcccttgatatatttatatatagaacttgtatattcggaataaaagctctatatttgttgtattgaatgttctgtctaatgcaaatatacgaaataacttgtatatattatccagtgttcatgaacaggccttttgagccctattttagctcttgtgattattctcgatggaaaggattgaaattacaaataaaggcaagcaaaaagctattaggagttaaatatatttttgataagttaacaaatggagcctgaaaataagtgtgataagccaggttctcatgcgaaacaaaaacaaacaataaatttaaaaattaaattaagatgaaaattaaaagtttgatgtatgtccttatggggacaatgttggttactacttcctgctctgataatgagttggaaaaaggtaacgatggttcgggaactgttgacccggtaaatgcttctgcacttgtgaatgtatattccgataaaagtggttctgaagcgagtctgcttgtgggagatgtattagtgaaagattcccatactcttacgttgaatgttcctgctgcttgcgagaaagtgtatatgaaatacaatacagtttcgggaacagaagctacaaaagaatttgctttgtctcctgttagtcgtggtgtagatcagagtactggtttcaattttgaaacaaaccgtctggcatcggtaactcttgcgcttcctgaagatgcagtgcagccgacaaatgaaacggaccaaggctatcttttctatcataacacaggtgtggtgatgttcgaagatggttggcctattcaactggattcatggtatgatgaagatttcaacgatgttgtattcgagtatgacttgaaggtgactgaatgtcatagtcaacagatgatggagactgtaggaggtaaagaagaattgttgttgactttggatgttcgtgctgtaggtggtatatacccgactgtgttaggtgttgtactggatggtttgaaaagcgagtatgttgatcggattactgcaagccttgtactaaaaggtggtcagggaacaatgacagacttagctaaagaggaactttctacaaaaaatatagtgaaagttgaaaataaaaattggaattggagtaatgatactcgcaaagaaccgcgtttcgcaatattgacagtggataaagcacaagcggaaggaactgttattacactggatggtttaacttctttgatggataataatcaggatatgtttcaggtaacacaaggaaaagtaagagaaggactacctatgttgcgtgctgaagttagactgattggtaaagaaggattaactggagctgaaagagatgctcagcttgcagcatttagagagttgattttagatactaatagacagaatttctttattaaggtgaacggtggtaaagaaatacacatgaggggttatgcaccgacttctgcttacaaagcagaatatgaagcattggttgcgggtgacactacactggatgcaaatgtttattattcaaataccaaaggttccacttggggagttaaacttccggttggcacacgtcatgcttatgaacgtgtaccatttagagaagcatatcctgattttactaaatgggtagatagtaagggtgcttcaaaccagaaatggtatgagaattttgttgatgaaaaaactataagatattggtaatgcaaattatcagtcaatacgttatttgagttattttgtacaatttgaacccctcttttttcgaaaagaggggtttctttgtattcggaagaataatctttaaactaataccgtaatgacgaagcgattttttataggctacagtttgattactttttttctcttaaatagtgtggtgcttttggcacagcacaaagcttcttttgtgcagcaatggaaaatagaagatgcatcccatgctttgcaaataatagaacgtgcagatacattagaattgatagttccggacggactgactatgtggtatcggcaacgattgacgggcgattatgaaataagttatcgtatttgtatggtgatgcaaggtggaaagtatgaccgcttgagtgatctgaactgcttctgggctgccaatgatcctaaataccctgatgatctttttgcccgtagtcagtggcgtgacggcatctttaaaaactataacacattaaaccttttctacgttggatacggaggaaatgataactcaacgacccgtttccgtcgatacaaaggagaatattatggagtggcagatgacaaggtgaaacctttattgaaagaatataccgatgcctctcatttactcgtccccaatcaatggtatgagattcggattcgagtggaaaagggaatcacaacttattctgtgaatgatgaagagttgtttcgctatacccttgcgggtagtgaaggtgacggacacttcggtttacgtcttttgcagaatcacgtactctttacagattttagagcgactatactttgacttatatactgaaaacctaataagactatatttccatgatgaaacaaccttttactaaatttggagtgacaactctgttttctcttttgtgttcagcattccttcatgcgcaagttgtaacagatgaacggatgttttcttttgaagaaccgcaaataccggattgtatcaccgctacccattcccgcctgtcggtatctgatctgcattataaagatggaaaacattcgttggaatggacatttgaaccgggtggtatattggaactcaagaaagacctgaagtttgagaagaaagatccgaccggcaaggatttatatctttcggcttttattgtgtgggtttataatgaagttccccaagatgcgaccattgagtttcagtttctgaaagacggcaaacgatgcacatctttcccttttggtattaatttcagtggttggcgtgccgcatgggtttgctatgaacgtgatatgcaaggcacaccggaagaaggcatgaatgaactccggattattgctccaaattcaaaaggaagccttttcatcgatcatttgattacggctactaaagttgatgcacgtcaacagacggccgatctgcaagttccttttgtcaatgccgggaccaccaaccattggctggttgtctatcaacactcgcttttgaaaccggatattgaattgactcctgtagacgataagcaaagagcagaaatgcaactgttggaaaagcgttttcgtgatatgatctacacgaaaggaaaaacgactgataaagaagtagaaaccatccgcaagaaatatgatttctatcagataacttacaagaacggccaagtatcgggagtacctatttacatggtacgtgcttcagaagcttatgaacggatcataccaaactgggataaagatatgctgactaaaatgggagtggaaatgcgtgcttatttcgacctgatgaaaagaattgccgttgcatataataatgcggcaaatccggtgattcgggaagaaatgaagaagaagttcttagcaatgtacgatcatataaccgatcagggagtagcttatggtagttgttggggaaacatccatcattatggctatagtgttcgcggtctgtacctggcatattttctgatgaaagatgtgcttagggaaaccgggaaacttcaggaagccgaacggacattacgctggtatgcgattactaacgaagtataccctaaaccggaagtcaatggaattgatatggactctttcaatacacagaccaccggacgcattgccagcattttaatgatggaagatacaccggaaaaactacaatatctccggtctttctcccgttggattgattttggttgccgtcctgcattgggattatccggttcgtttaaagtagacggaggtgctttccatcatcgaaataactatccggcttatgctgtgggcggactcgatggagcaaccaatatgatttatcttttcagccggacggaatttgctgtttccgagttagctcatgaaacagtgaaaaatgtactgttgaccatgcgtttctattgcaataagctgaacttccctctttccatgtccggtcgtcatccggatggaaaaggtaaactggttcctatgcattttgctatgatggctctagctggttctcccgatggaaaggaggaatatgatagtgaaatggcttcttcttacctccgtctgatttcagacccaagtattgcaaatgactctcccgaatatatgcctaaggtttcaaatgctgaagaacgtaaggtggcaaaacttcttatagagaaaggtttccgtctggaaccggacccgcagggaaatatagcgatgggatatggttgcgtctctgttcaacgtcgtagcaattggtcggctgtggcacgtggacattcccgttatctatgggcggcagaacattatctgggagcaaatctatacggtcgctacctggcacacggcagtttgcaaatattgactgctgcaccgggacagacagtaactcccgccactagcggctggcagcaggaaggttttgactggaaccgtattccgggagtgacatctattcatttgccattggagcaattgcaggctaaggtgctcaatgtggatagttactctggaatggaagagatgctttactccgacgaggcttttgccggtggtttgtctcaacagaagatgaatggtaatttcggaatgaagttacatgagcatgataagtataacggatcacatcgggcacgtaaatcttaccatttcatcgatggaatgattgtctgtcttggttcggatattgaaaatacaaatacggagttcccgacagaaacgactatcttccaattggcagttactgataaagcagggcatgattattggaaaaattatcaaggagataagaaagtatgggtggaccatttgggaacgggttattatgttccaactcccatccggtttgagaagaactttcctcaatactcgcgaatgcaaaatacaggaaaggaaacaaagggtgattgggtttctttggttgtagattatggaaaggcaccgaaaaacggaagttatgaatacgctgttctgcctcagacgaatgaaactctgatgaagaaatttgcaaagaagcccacttataaggtattacagcaagaccggaatgcacatattgtagagtccgtttccgaacagatcatttcttatgtgttgtttgaaactcctgaaacgacattgccgggtggtttattacaacgtgtggatacttcctgtctggttatgattcataaaggatctgctgataagattaagttgacggtggcacaaccggatttagctttgtatcgcggtccaagcgatgaagcgtttgataaagatgggaaacgcatcgaacgtagtatctattcacgaccatggattgaaaatgccagtagtgaaatacctgtgactgtaacgataaaagggcaatggaatgtagaagaaactccgttttgcaaggtgatttcttctgataagaagcaaacagttttgcagttcagttgtaaagatggtgctagctttgaagtggagttaaggagataaaagtcagacaataggagatcatttgcttttcctgataggggaacactagtttctcttggagaaaccatagtttccatgccgttgaaactattgtttctcggtgctgaaactacagtttcccaatgctgaaactttagtttcccggtacgaaacctttggtttcaagccttgaaactaaaagtttccccacgagaaacaaaggtaatgcattcatgaaataaataggattgcctggagcttccagagtgaatacctccgcgttgtgaaatgtagtttatctgtttctggtgacagcattattgttgtcacactgctgtcacctattgctgtcacggtgttaattgttaataatcaaaccgttaagcagcaatcggtgacaggtgacagatatataattaaaataattgtatagagaggttagaacataaacatggcaacggcaacaatacggttgttacatacggcatgggtatcttgaattttcccattggacgtattgagcgaaccataccatgcagagcttaatgtatattccaacccgaatttccagtgggggacattgtaggtcagttctgctcctgccgtaactaattggttaaggtctgttcctgttccataaagttttgcatcatttcctttgggagcatatagtgcatcacttgttcccagattcttggcatagcctacgaagattcccggcttccatttctgtccgtagacaacgttgaaccaagagctggagaaacgtatcggagtatattcttgttctcccgtttgttcgttgacagacttgatcccgaatccacccaaaccggaagcttgtgtcagattggatcctaatacactcttcgcagcgatgaaccagtctttgttggtgtattttacatgagcttcgtatgaaagagttgtgatgcgttcgtctaccttgtatttatctgtatttactatagactccgtacgtggtttcaatgataacaactcaatgcctacgccggccagcaaaccgccattcttataatcagctccgacataaaattcgggaatacagctttgcttcagatacttatgtgttttcccttccggtccttgtgaagtatattgtgattgccacactgcggctccggtaagttggacattcttgtttgtatagcgataacgaatttgtggcgcacggctgaagggctgaaacggtgctcctacggagagattaagaatctgcggagacacatctccgaataagggatgccagttctgtccgagtaataaagctgattttccccaatccagattcaaataagcatgacgaaggcgaatgaccgaataagaagtgcctgtgccgcggaagtcgacctctactttggcagaagtcttggccgtccccagcttcggaccggcaacgtctactccgagacgtgaatacaaggtatagaaattgctgttaggcgttgagttcaaatcattcccatccggatcacgtaccttatctttcggatacatataaaacaatccgtctacggtctcttcattagcacgactattataataaaagtcagtacggatttgtccgtagaatttgaacttgaaatcctgcatttgtgcaaaactgcccgatacgattatcaggcaaagaaataagagaatgtactttttcataatgtgcatgtttgtaaacgggtgcaaaattacgtaaaattactggttattagtttatcgttgattaaaaaaggcaagtattgcctgattgtatttgttgaggcttgtgcttttatgaattgctttcagtaattttctgtctgcttgcggcattaaatattcccagaaagttttcattttgttcagaagctgttcgtctcctccttctaactgttctgcatattgattgtatatacatttatgcatagattgcaatttttctcttatttcatcaagctcaagtgtacggttttgtctatattccaatgccaatgccgggttggcaagtaatcctcgtcctatcattattccggctaatccgggaaactgttcctgaatgtggtgaatatcttccacactattgatatccccattatagatgagcggatgtttgcagactccctgaaaggcttcaaacgctttaaggtcgacttctcctttatattgctgttttcccaagcggggatgcataaccacttgtcgtagggggagctcattgataatcggagccagtttcagacattcctccggatcttcccaacccaacctcattttgatagaaaaactaatttgcggatattccgtaatcagccggctaagtaacgcttgcacttcttcgggataaggaagaataccggaaccattgtggcgtttagccagcatgggaaaagggcaccccatattgatatcgacttccttatatcccttttcaatgaatagggataagattttttctgctttctcaaaagagggagctatcagttgtggaatcagatggggtacttgattattcccgggttcgattcctcggacatctctatggcgaaatccgcctttttcgagtcgtacaaatggggtataataagtatctatacctccgaagcaggcagcatgagcattacggtaaatcacgtcggtataaccttgtaatggggcaaaatgaataggaagagtcttttgcattgtttttatttttgtgcaaacttatatataaatgttgatttatacgctagttgagtaaagaaaaatgctttttcggaggagaagaaagggaagagggtggaaagatatggtaaaagtaaaagagaggaacctcgcggtccctctctttctgatgttaaattgattaaagtctgatttttataaacgttttctatgattgaaggttagaaaaattgggggatatgcttttattctacaacgtttatagtcagttcacgtattacttgaccaccttgatggacgtagtttgcattgttggctacgaaggtagcggtgtatgttccggcctcctcgtaggtatgtgagtatatctctaatgtttgcgagatatttttgatggctacaccagcgtcaggatcgcaggaaccattgaggaggattggattggaaataagccaagtatctcctttggtataatcttttttacctccactcgttacgaaatcattcggttggctagttctccaaaaatatgggatattaccgtccactgtggtatatgctatcttgtctgcatattctgcgcttttcatttcttcaagtgtcagatttttgtttcctaatgcttccttcagtttgttgaaatgtcctccgtcttttgcaagatcatctaaattataggttacattcaatgccgagaattcgaagttctttgcattaattgtggttgatttcccattgttgaattctagattaagttgtaatcctttaatatgtataacaggcattgtagcgctgttgtcaaggggattcaggcggaaagcaatgctgatttccttgcccaagtaagaagtcaaagggcaggaatagtctttagtaactttggttgctttaggaagctcatcttggctgacaagttctgtccattcgcaattagtaactgcttctttgtctttttccacattgttgccactaattccttcgaattgatcggatattaatatgtgagtagaaccttcgatggttttcgcactaccatagtcatatactacggagaagttgatttcacatttttctacgtcttccggttgcatttcaattctgttccggtgtttgtattcgtgccctatctcaccgctgaagaaactgataaaatcagggtcaccatcgaagctgaacgttacagggtttcctttctttacagtcacagttttgccatcgaagctgacattgctgtctgtcaccacacccacttccattgctgtttcttcttttaattccttgtcgcatgaagccagggatagtccggcaaaagcgatagtcatcaaacttttatatattattttcatgtccttttctttttaaagttattaagagaattaccaacccggattattcgtcttgatagcaccgtttgatcctatttcattggcaggaatcgggaaataattgtaagacttcggaatattgaagtaagtatatacattgattccgaatttccaggattcgtcagcctgtgccttgtccacttgttcctgcatcagtttgtaatagtctccccaacggatcaggtcgaaacggcgtgtgtactcgaaacagagttccattgcacgttcgtctttgatagctttgcggaagctctcttcatccagatttgctgcaagttttttgattcctgcacgttctcttactgcattgatacattcatacgccaaatcattagggccatggttgacttcattttctgcctctgcaatcattagcagaatgtcagagtaacggagaagagggaagttgatggaagtatcgtttttactcttcttgtctgcttcatattctctacgatatttggcggcagccctgttgcggttcttattggcatcgttcttcgattcacgatcaccgtaagtagaccccggctctgttttaccatagctgaaggatttatcccagtattgttgttccacttcatctctttttccctttacaaattcacgaccgtccaccggagtaccttctcctgctgactgggtgtaagtgaatggagcaatattccagttgcaacggtcaatgtcatcgtttgcttcatacaattccagcagtttaggagtattccagataaaagcgtatgcatagcccggatcacctttaccagtaatggatgctttggaagaaaggtccttaccctgaatgccgataatattaccgattctaccttctgcacgtacatccgtcgaacggttacctgcaaattctacttcccaaatactttcattagccttggcaccatccttattgagagcagtgttatacttatcagaacaaatgtcgataaagaagtcccaatatttggcagttagtgaatgaccctcattcttgactaactgtgcatagtaacttgcttttttgaaatattctgtaatctcggcactagtcgtgttgttagccaaacccacttccttgtcacgtttaggttcaccggcccggaacatatatacacgcgccaacattccccaagcagccgatttggaaacacgtcccggtaaatagttcaaatcttgagcagatttgagatcctcggcagaaccatacatctctttgatgataaaatcataaatcgtctgtttgtccgtacgtggaatggagaggttataggcatcttctgtagaagtagtcttgaaaggtacatctccccaacattctaccaaagtaaaataatagaatgcgcgtaagaaacgggcttcggctttgtactgcttgcgggtatcgtcgttcatatcgggcactgcatcaatattttccaggaaaatattggctctgttgatgccggagtataatgtgtaccacaatgctgcaacggccggatcacttgtgttggcattgttacagatcaacccacttttgttaggtccgcggttggcaccaccatagtgtcccagatcgtcacctcctacaaggtataagaactcatttccgtagaaggaactttgtcccagaatggcataggttcctgtcagccaagaggtagcgtccgcttcatttttgaagaagttttcaggagtggtgtatgtcgggtctttttccaagaaatcgcaggaagtcaggttaagtccgacaagaagtgatatgatgattatttttattgttttcatatacgtaattgtttgaaggatgattgattagaaacctaagtttataccaaaactgatagagtaggctctcggataagcggagaagtccagtcccggagtcagtgcgccttcacggatagatacttccgggtcgtaaccggaataccctgtacatgtccatagattctgaccggcaacgaatacgcgtgcattgtctatcttccatttcttggtcagttgtttcggcagtgtatatcctaaagacacggtcttcagacgaaggaacgaaccatcttcgataatacgtgtagagaacactttgttagaaccggagtcggtagctctcggaatattactttccggattttccggtgtccagcggtctgcgtaacttgcgtattggttcaagtcacgtgttttattgctgttctcgaagaacaggcggttggcattcaatacatcgtttccatacgaccattggaagaagatgctcaagtcaaatcctttgtattcgaaattgttggtaaatccgcccgtatgtttcggcataccgttaccgatcatagtgcggtcgttatcgtcgatgataccgtcaccattcaggtctgcgtatttcggcatacccggttgtgtattactttcggaagagaaatacggaacattgcgtttcagtgtatatgtatcacctactttgtcgaaatcttcgtatttgtatgtaccttcgtagatgaatccgtacatcattcccatcggataacccactttggcaatgtagctgtattgagagttatagttctggtcaaatttggctgcactcaacagagaagattggttttcggccaattctaatactttgttcttgttgaatgcgatattaaagttagtagtccatgagaaatgacggttcttgatattggttgtgttcaatgtgagctcgataccttggttgcgtacctttcctacattcttcatggcactgaaataaccggaagaggtgggaagtgcagtattcagcaacaaatcacgagtcgttttacgataccagtctacggttaatccgatgcgttcgtccaggaagcctaagtccaggcctaggttccactgttcggtagtctcccatttcagttttctgtttcttaaggaagtgggcactgtacctacacttgtcaggctgttttcgaacggatatacaccactcggtaggctaccgatcgaaataaaatctccaactttatcttttaatatctgatataaagcatacgtatcatactcgcctacacggttgttaccggtcaatccccagcttgctcttaatttaccggaagaaacaacagacttcaatggtttcataaaatcttcctccatgaatccccatgccaatgaaccggaagggaaatagccgaaacggttatcaccacggaatttggaagaaccgtcggaacggaaagaaaccgttgcataatacaatgatttgtagttatagttcaaacgtcccaggaaagagagcatagaccaggaactctttaatgatttggtcgtactgggagttccttcactcattcctgccatcccgagtgcttcgtttggaatttgcactgtcttgtatgaatagtattcatagtcagaattttgcagagttacacctaccatactattaaagaaatgcttccgtttgatattggtctgataggttagaatattttcgttcaaccacgttgcacgttgagaatggtagatttctgcattcaccttatcggatgatttcggattaccataacgagttttcgagttgttgaatgtttcccctttgcgggtatcgaatgtgtaaccgccggaaactttcaacttcaatcctttgataaattcatattctgcaaatccgttgaactggatatagttcgcgtacgtcttgcgatattcatttttcaaagacatgatagggttgaaacgatagtcgttggtattgtttatcgcgtcgtccatgatgttatccatcaacgagtttaatggtctgtccggttcggtcacagggcgatatccccatacactatagaacaggttattcataccactgtatgagttctgggaaggagaaccaccggtagttgtagtactggaatagttggtcgtcagatagattttcagtttcttcttttggatggtagtacccatacggccttgtacacgtttgtagtttgattccaacaagataccgtcctggtcataataagataaagaagcattgtagcgaactccttccgaaccaccggtcaggctgacattgtggctttgcatccatgcgctgcggaagatttcatcctgccagttatattgcgggatatttctataatcttccagtccccatttcttaccgtcataattcatgaagtaggtagtttccatatctttgggactacgttctgcctgtagtttgacgaattcataggcatccatcatcgggatcgttttggtgatatgctgaataccgaaacttccgtcgtatttaattttaggttggccgattgttcctttcttggttgtaatcatcacgacaccgttggcaccacgggcaccgtagatagcggtagcagaggcatccttcaggaagtcgagtgactcgatatcgttctgattaatggctgcggctatggaggggtcttccaccgggaaaccgtcaatgacataaagaggagagttgtcctgtgtcaaagagttgttaccacggatgacgatgttcatctgtccgcccggcataccttcgcccgaacttacgttgacaccggcaatacgtccgcccaatgtctcgccgaaagaagcagtcggagtgctaagcagttccgccatactggctttggcaacagagccagtcagatccttcttgcgtatctcctgatagccgactactaccacttcgtccaatgtctttgtgtcttcctttaatgtgataaccattggcttttgagtgtccaccttcatttctactgtgacataaccaatgaaagaaataaccaatatcgaatttttattgggcacgttaaaagcaaatttaccgtcaaggtcagtgattgttccttgcgaagtaccttttacctggacactggctcccggcactccttctcctaagttatccttcactgtacctttaacaagtacctgtgcaagtacaaaagaaacagaaaacaggatcagtccgatggaggagagcatcctttttctagtttgagtggataaatgttttttcatatattaaaaattaagtgattttattgaatctacgcttgcaaagatagatggattgaatattctaatatggatagaattattcaagattggtgcaaaatcatacaattttcctgttctcataaactatttttcttttacggattctagtaattcagataattctttcactatgtcggggtattgttttgatacattcgttttctccgatggatcggaggataaatcgtaaagttgaggctgtttgtcgttgcctaactccattttcgtccaatactcgatagcggggccgtcgctcggttcgatgtatttccattgaccttttatgatggcaagtgtgttattgagattctgttgaacgacatactcacggtttgtattatttttgccgaggagtacgttcagatgttcttgactatcgggagcagctcctttacgtaaaggttggtccaaaagggaggcgagcgatgcatacacatctatttgagagaaaagagcttgttgcttgttcggctttactcgggcaggccagcggacgataaatggaacgcgtgtccccgcttcgtaagcactgtatttcccaccacggtagatccccatcggagtatgcccgttgagaagttcgtaagcttggtcttgatagccgtcgtcgataacaggaccgttatcgctggtaaagatcaggatggtgttgtctgcgatgtggaggctgtccagtgtgtgcatgatttcaccgatggtccagtccagttgcaggatgacgtcgccacgagtgccgagtccgcttttgcctgcgaaacgtgggtgggggatgcgcggtacatgtacgtcttgcgtacccatatataaaaagaagggttcttcctgatgggatgcaatgaaattcttggccttgttggtgatgatatcggctatgtcttcatctttccaaagggcggattttcctccggtcatccagccgatacggggaatgccgttgataattgtattgttgtgtccctggctgggttttaaagtgacgagctctgggttctcttctcccgtaggccagtcgcctactttgtggtcgtagtttacggtgataggatcattggggtcaagtcctacgacatgtccgttttctacaaatacacaaggtacacggtctacggtagccggaataataaattcgtagtcgaacccgatgctttgtgcgttaggggtaatccggttgttaaagtcggttccacctttcggaccgagtcccagatgccatttgcctactgcaccggttgcgtatcctgcatctttcagcatatctgccatggtgatgcaggtagtgtcgataatgagttcagagttgccgggagcgattcctgtgttttcctgtctccaaggatacatacctgtcaggagtccgaaacgggaaggggtgctggtggcagaagttgcataagcattggtgaattgtactccttgtcctgccaaccggtcgatgttgggagtgctcacttttgttgctccataacaacttaaatcaccaatgccgagatcatctgcaaatatataaataatgttaggcttttggctattctgcccattgttcttttggggtgcatgattgcatcctgacagcgtgacgatgccggacaataggggaagtagacgcgaaacgtttttcataatgctgaatgttttaggaaataatgtaatgaacacaaagataagcgaatggaagaaaaagaatgagtaggaatgtacaagtgaagtacaaaatagtacacttaagaggttaccttctttattcgggcgaagatgtccggactaagaaaccgtttatatcataaatttaggcacggattacacggattaacgctgttgttttcatactcatcgttttttaatccgtgaagtccgtgtgatccgtgcctaataatataagattattttgcaagagtgcttgtatagttgcatgctaatctgtttcttctccgtccccttcttcttcgctctcttctcctttacgataagccagcggactgacgtgataaatctccttgaaacatttactgaaatagcgggaggaggagaacccaatccggtcagagatctccgtgatattcagctccgggttattccttaacatgacagcgccttttttgagacgtatgcttaggatgaaatcattcggggtctggcctgtaactgctttcagtttagtgaataggttcgtacgtgccatacccatttcgcgggcgaagatattaacgttgaaatccgtattgtccagatgacgttcgataatggccatcgcgcggtcgagcatctccttatccatcgggttggtagccaacatttgggcaaaagcctgtggttgtttgctgaacttctcttgcaatagccggcgggaattaactaggttattgcagcgggaaatcagaagattggtattaaacggtttcgtgatataatcatccgcaccaatcttcaaaccttcgatattgtgctctatagcagtacgtgcggttaataataccaccggaatatggcaagtgttaaagtccgtcttgatctgtttgcaaagttccgtacccgacatgcgtggcattacgacatcacttaaaatgatgctcggcatatccttctgtatcatctctaatgcttctactccgtcggaagccgtactgacttgatagaatgtttcgaaaataccgactaacatctgtttgatagattcattgtcttccactatcagcattttggcgtcttcgatgcgcttgttatcttcttctttccattccgaatcagggattatttctactgaaggaacaatagtctctgtttgctggatggtttccgtatcatctttcgctatttgctcttctgtgaagtgttccttgcctagtttgagggtgataatgaaactgcttcctttgcccggttcgctttctacccggattgtgccgtgatgaagttccacaatacctttcgtcagtgccagtccgatgcctgtaccggctccggtattcagcgagttgagatgctcggtctgatagaaacggtcgaatatcttatcaatttcggcagcggcgatacctgtacctgtatcttttatttcaatgatgacatggtctttctcctgcgatacattaatcgaaattgtatcttcggccttggtatgcttcactgcattagacagcaggttgtttatcactttctgcatctgcttttggtcataccatacttcaatgtcatccttctgtttgttgaacttgaagttgatttgtttactgctcgcatattcgaggaagagcaaataattctcatacaggaagttaaccagattgtgctggctaactttgatcttcatgtgaccctgttcctgtttacggaaatcaagtagttccgtaatcagttcccgtaattggagactgttcttgtagattcccaataccttattatatatattaggcgtaaatgtctgcacctgcaacaaagtttccacttgtcccacgatcagcgttaacggtgtgcggaattcgtgcgagatgttagtgaagaaacggagtttcgactggttcaatgcttcgaggtcttcaatatgcttcttttcgtacttcaaagactcacggagtttgatgcgcgaattatagttctgaataagataccataacaggctgatagtgacaatggtataaatcaggtaagcccaccatgtctcataccatgaagggagtacgataatcagcagtctggcctcttttattccttccctctgtgatttgatgacaagggtatatttacccggattcaggtttgtataagtaatcagcgtttgcttccggtaagtatggttccattcgtctgagaaaccctccaggcgatagagaatttcatctctgttggcagggatgaagttggaagtggcatattcgatgctaaacatcgattgattcgctttcagactgatttccggagtatgacagatcgactgttccaggatgccgctttcatctcccggaactacttcttttccgttgacaaacaggcgggaaagaatgatattatatgatttgggagtgaaatgtaattttttctcccagaaagaaatcattccctgaataccgccaaggaatacttctccgtcatgtgtcacaaatagtgcgttttcattgacggcagtcaacgggaatccattctccgtaccgtaattatagaatttcttgcttggatagttgaactgtgagaatccctgattggtaatcagcaataagtctcctttctgtatggacgattcgcatacttcgtagatacagtcgctggataaaccatctgtctgtacatcgaagttttcaaagtcatcacttgccttacggtaacggtcgagaccgcttccggaggtgcagaaccacagattaccgttactgtcctgcatgatactgttgatattattgttgctaagactgttcggattagcgggattgtgtggataattagtaagtttaccgctgtcgaaccggtaagaataaacaccctccccggtagccgcaatccacaatgtaccgtctttatcaatgcaaagactggctaccatgccaatacctcttccttctttagtctctttgaagagctgttggcaagcgcctgttgccggattgaaaagacaaacaccgttttgtgtggcgacaaccagcttgtccttataaggtacaatgtctcggacgatatccgaaggtagtgaggttgggtctccggctttcattcggtagactgtgaaacggttagtacgcaggtcgagtttgttcaatcctcccaagtgtgtacctatccacatgatttcattagtccggtcgtagtagattgctttgacattgttatgggaaatgctatttttgccctcttcgtggcgataccaccgataggtgttatccttccggttatacacattcacgccgccgccttcggtacaaatccacaggtttccgtccttatcttcagtcattctaccgacgatcggactacttagaccttctttctctgtatctccggttttgtaacgggtatagatttcatattctggattgaaatagttgacacctccgaaataagtacccagccaaattgttccttgttcatctttgacgatgcaccagatggaggagtgggtaagtccgtcgggtttgttcgcgttggcagtgtaaagttggaatttacctgtgctcttttcatagcgatttaacccgtgaaaggttcctatccacagatttcctgcattatcttcacagcaactccttacgaaatcggtgcaaatactgtttggatttttaggatcatgacggaagttctcaatggtactatctgtttttatccggtagagtccttcttcccaggtacagatccataattctttagacgaatcttcgtaaatactcgcgatattacctcttgtgacaggttgggaaatctttttgtctcccgataaacagtaaagtccgttactggtagttcccatccacagatttttcttttcgtccaggtggaggcaggagagggtgatatcttttccggcaagatgatagtagagatcgaagtttccggtactttcattatatacaaacacttcttctcttttcccgatatataatttctcgttgaaataaatagcatccacattgccttgcagcaacgttttgaatctttgtgtggtcagatcgaactctgctaccccgtccgtacagagcaggtataccttcccgtttttgtttccggtgatacgcagcactgtattgctgaacaaactgttcggatcgtttttattaagtttgaaacttttgatatcgttaccgttataccggttcagtccttcacgcgtgccaatccatataatcccccgttcatcaatataaaggctattgacagaaaattgggagagtccgtcgtccgtggtcaagtggctaaaagtgatgttttgaccttgtgtgcggactccagctacgcttaaaaatagcagaaataaaagaattacttttctcactaatttattttttaaggtgtttacatctatgcaaatatattgtttttattcgatttcagtgaatcttattagaagaaagtaactataaaacaccggaagagaattctatttaacagaattactcttccggtttctaacctaactaacctcttgttatagtgtttgtgcctgtttcgtttttatcagttcagattattaccacactacatactgattgaaaaaacgagtactttcagcaatccatgagtccatgttctcataagctgcaaagtgtcctgatgtagggtaacatatccagcgtttaggtgtacggatgtgattgtatgctgcaaaatttgtatgtggtggtgtaatgttgtcctgaagtccgaatcccattaatactgggcatttgatccatccggtcagattcttcaagtcaaagtaagttagtaatgagaatattttatctttgtcaatattctgccgggcagctccttcgaataccaagttggcaggcctgtgaaccaaacggaaataatcgggatagtctgacagaaagggtacgataggcgcagctgcggaaatacgatggtcgagtgacgctgctgctaatgtgagcgctccaccttgcgaaatacctgtagcaaaaaggttttgtccgtcaaagcatggctgagcaaaaataaaatcaatactgcggactgtatcagcaaaagcacctctgtaatagtaatgtttgggtgaatccagtccgaaagcaatccactcaccaaagcggttataaggtttgttgaggccttgtccacggggtggaatgaccaagatacaccaaccgggatagtcgtcgggactgggaatccaggtgacggcatcataaccttgataaaccactacggccggatgactctgaccatctgtagggactgcccaatacccccgtaagatttctccttcaagcgagcgcatttctacttcgtaaacatcacgctctggcttcgaagattcaggtagacgtgtcattttataggcagggtgtacacgtttaagttcggtgatggttttattccaaaatctttttaagttagggggaccatccggtttggataaaatctgttcggcttcgtatccaaagaagaaatgtttcagagtatcggtgccggcaatgaaacaaacctggtaaaatccgggagtgagattcgtgagagtgactgatgcacgactgcgaaagcctccaccgggagctatcgaatctgttccgaaagagtaggttataaaggtagacgatacagcattgccgaaatctgttgcaatgtccatgcgtatcctatccgaaaaacctgactgtgcagatgtcaattccagcatgaagcgtactggatgttcgttatcgaacatccagttttgctcaacaggaatattgagatttatggtcttctgtgtataacttcttattgagtatccggtcaggagtataatgacgtatatccacttttgcatcctgttaatcattgtaattactctttgatataaaacgtaatcagcactcctttatgatcgcttggccactgattgtttacgggcggaatgattggatctttggtttgttcttctattctttgtccgcgtacaatagagcctgttggacctactatctgggcactttttatttgtagatttttatttggataatagtaaacgaaatcaattcgttcgcgttcatctgcctccggtgcccatgagagattctctggaatgactgatttattgtctgctggaaaagtgaatcccggacatttcaccggatcgggatgaattacccggtaggcatctttatatccccgttgaaccaacaatttggaagttccccaattgacgatacatccgcgatgatcgaatagatcttttgtatcggcctgccaatccagataagaaggctcattcagatctccggcaaaaaatacgagtgctccttgctctagctctttggcagcgttgttgataaaagcttgggcggattctatacggtctgattcttcgcagacagcaagtatcttgtttacatcagtgataggagccggaagtttatcccaattaacgctaccgtcattgtatccccggggatagtaacaggtgtagtaacgatactctgaatgtgccgggtaaacggccactcgtttcccattgacatccagaatcgctttgaacatccatttgttgatgcgttctgtctctttgatcggatattttgatatgaccgctcttccgtctattcgtgcatcgtaatagatgagtcccttatctttaagcccttgcattagtttaggcatcacgggatcgtcttgtggacctttatataattcgcaaaatgtagcaatgtctggctgtagggtagcaatctgttctatcagatattccggagcatgctccaccttggtacactccacccataagttgagttgaaggaacttaatctctgttttctttcctgtttcttcttccggtacagatacttccgtatcggttttagaacatgcagtgataacaggaagtatggcaataataatagttaataaccacttttgcataatctgtattttttagatttgattaccagcccggattctgacagttagttcctgaagcattctgtaaccggatcgcttcgtcacccggtattggatataataggaatttttcactatatgcttttcggttattatctactacaaaacgggagtaacttccatctgagtttgccttcattccggtaattactttatctgtttgatccagcatcttccaacggcgtacatcaaagaaacggtgttcttcaaaagcaagttctacgcgtctttcgttcctgattcgcagacgaaattgatcacaggataatccgtaaggaatgcctggcatacctactctggaacgtactgcattgactgcgtctacggcatcattgggtacagttccggtagtagatgcttcattagctgcctctgcataattcaaatataattcagccaggcggaactctttgaagtaaccatccagattgccggaacgtccggatttataatgtgagaacttacgcgtataatagccggtacaggtgtaacgtgcgttactgggatcaagtgcacagtttcctcctgtcttggttgagagtagtgcaccggtttccaggtttagtttagaaccatcgtaataaatagaagctttaagacgcggatcacggttctcatacggtttggctcgattgtagagaccttcaacagccgaattcaagttaggctgcagatgattggcatctagataagggctctctaaattgagcagaggataagattctgtcatgtcaccgttcacaacttcataggcatcaagtagctcttgcgacggacacgcaccggcatctgtctggccgtcggtagttggcaggccagcataattccacatatacatttgtccaacttccataatggtttctttgtcattaactaccggcaagtcagtgcgcgaatagaaatacacatcataaggagaataaccagctgtagcattcggctgtttcttataaagttcataattgttcgccagacagtcatccagagactttttagtaatttctgcggcttctgtccaagtgattgttccgtcattgtacagaggactggctgcatagagtgatatctgtgaacggatggctgcacagatggcttttgtcataacgtgacggtagttctccttatctaaggaacgccatccccattcttcaacagtgggaatatcaatagcagcctgacaatcagctaatatttggcgggcacactcgccaaatgtacctcttttaaccttggtataatcgtagtcgggagttgttatgatgggaacacctccataacgtttcaccaattgaagataatagaaagcgcgtaatgtaagtacctgtgccttgaaactgttacgtatatcttccgagtagacactggcagtagggatattggcaagaaagatgttgcaggcacgaatcccttgataataataattgtagttttccggatttccttcgatgccctccagcggattgctgaagggagataattgtccttcattccatttgcgggtaactccgttctgtagttcccaggaatctttggcttcatccgtacaaccagctagcatggtatagttatagttcattccgtaattcagaatccatccataacattgattcatataagtatacgttttacggttcgtggtaaacaaatcgctgtaatccgtacggccgtccggatgatcttcaatttcagtacatcctatgaatgaggataatatgagcaaggagaatactcctgatatgattttatttattttcataacttcagtctttagaaattcaggttaagtcctatgttaaatgttctgtaaatggggtatacagagtaggaatattgttccgggtccagattatcgaacttgagagatgaggtggtcaacaaattggctccgctgatatagaatctcattttctccagtttcagcttactgctccaacgtttaggaagtgtataacctaatactacattcttcaatctcatatagttatttttggaatagaagaattcattcgattggagacttgaagagcttcctgtggtcaaagccggatagctgattttttcatttgccgcatagcgatctgctgtccaggcattacggtgcaggtctgtgtacactccttggtaagcattatcgaagataccgcatccactgtaataggctgctgtacctgatacaccttgtaactgaacatacaagtcaaagtttttgtattccagttgaatagaaccaccataagaaagtgtaggtagtgtctgggctttgtccatcggtgcctggtcacgctcatctatatttccgtcgttatttaagtctttgtaaatgaaatcacctgggcgcggagaagcaccagagaatcgcagaccgcttttatctatttcctcctggctattatagtagccgtttccgttggaatagtcaatcagatatccgaactgttgtcctgcagaatagccggttttacgatatggatagtaatatccgctggcggtacggttcaactcttttatgtcagttacttcatttttattgtatcccatattccctctgatagtcattcttaatccacatttcagattcttgatataagatagttcaagatcaaatcctttgttgttcatcttacccagattttcaaatggcagattttcactggcgataccttgtgcagaagatacactgttattttggatagccatttgggtctgtttcacgttccaataatcaaatgtgatacctagtgagttgaataaggtaacatctattccgtaattttgctggaaagattcttcataatggatatacggattaccttgcataccttctacagtatgaaagccatagtagttgcttagtaagtaacctgcatctttataacgtacatctgtagcatacaggaaacgggtgtcagatatctggtcattacccagccagccggcagatgcgcgtattttgaggaaggacaaccaatctgtgtctttcaggaaactttcgttggataccacccaagcggcagatactgtcgggaagaatttaaaacggttacctggtttgaactgttctgtgccatcataggtaaagtctccctgtatatagtaccgtgaatcatagccgtatttcacatgtcccattaatgacaaacgatcgtatgggagatcaccgtttttcatcatattctcattgaaatagctgacaaatgcatctacttcatgtttgcctccaaaaatacgattatagttgatgaatccttggaagttgataaagtagcgcatattagcggtcttacttaaacttagaggaagagtggtgtgagtaccgaaaagtccgctgccattggctgcataacgtgcgtagtcagtagaaccatagattgttccgtcatagtttgcttcataacctactattccttttacgctcaatcctttagtcaggaatcccagatccagattcattccataagcgacgttcagattgatacctgtttgatggctatatccggagcggttgataagtccgtaagtaggatattcattgtattctgcagtaatcacttttccgtcttcggtgataggtccaggtacggtgggggccatctgatagatcgaattcatgatatctcctgtcccgttgtatccttgattcatccggtcgatagtgacatttgtgttaaggaaacagtttagataacgatgcagagtgacgtccacattagctaaaatgttgaagcgatgcaatttgagtgcaggattataattatcattcttctctgcatcaatcaggctgttttggtgaagataaccggcattaacaaggtatttaacccggttgttacctccgctgatatttacgttgtaacgttgcatactggctgcatcattcataaaagtgtcataccagtcgtgtcccggcatagttccatctgtaaacccggctatttcatataaagaatagagtggagtgccaccgtcattgagtaaggcctggttacgcatttgtgcgtattcaccggtacttactattttaggacgctgggtagcctgttgtatggagaagtccatgttcacatttactttagtacgtcctatttcgcctctttttgtagtaataagaattactccggaagaagctcgcggaccatataatgctttagctgcggcatctttcagaatactgacagattctacagtgttggcatcgagtgtattcatatcgaataatggagccggaattccatcgagtacaaccaaaggtgaattaccgtttatggaattcagaccacgtatatacatcgttgttgcatcatcggctggtgtgctggtggattggatagaagtcaatcctgccaagcgtccggtcagcgtagctgaaaatccgctattaggtgttttaactaactcttctccctgaacggtagagattgctcctgtataacctccttttctctctttctgcagcatggctacttcgagagatgtatcctgaccggcgatgtctgatatcagacaaaactctaccggtttattcagagtgaatttcattgtctggttccgatatcccggaatcttacaaatgaccatactggctcccgacggaatctccatgatgaattttccgtctttatcactgcttgtggtgtattcgggattgtccgggacagaaatgattgcgccgtctaaaggttcgttgctctcattccgcaccacaccggatataacttcttgcacttgtgcccggcatacttcattgcctgtgaacaggcatacgatgcacaaaagtgtgattattctgtttttcatatacattctgttttatgattaccatcctgcattttgccacgtctgtcctgtcgtgccttccaatacggctgcttcattggcagggataggatatacgtgccatttcttttcataactcattttgctcggtttgctgccgtctgttcctagattgattctttcataagagaatgagtttccatttttggtgattctcatacctgtggtaaacttctcattttccatattctcattggcgggtgtccaacggcggatatcgaaatatctgtcttcttcacaagccagctctatctggcgttcgtggcgtaccaataaacgagcttcgttcttgtcgtttgtcgacagatcaaccgaaggatcaaaacctgcgcgatgacggatttcattgatccattccaggccttcggtaaggtgtccgctttcaatagcggcttcggcggcattcagataaattttgcctaatcggtaaaaacggaaacggccatcatatccagccactccggctgccttacagttaccgtttaccattctttttctccaataataaccggtacgtgtattcgtatttccacttgtacggatttcgctatttcctcccacgtacgtttctactactgccggttcctttcctaacagcacaggactgttattataaaaaattgtagcctggaaacgaggatcacgtcccttataagggttggctgggtcataaccgctattagggttataattaggtgacagatgcttctcatcgttataaggtttcgataaatccagtacaggctttcctgttgctagcatatcataggcgtctactaattcttgggaaggaacaatagttaattgagcgtttcccaataccggagctccgataacgtcatacaaaggattggtgtatgggtcgggccaatagccttcggtactttgccagattgtttctttatcactgggatctgttccgatatagttattgagcgtaaagtactccatataagcattgttatagtacttttcagtatccgcacatttagtatacaattcatatccattggctttcagctgttccagacagtctttgttgattgtgtaagcccattcccaaagatctttgccgccattgttgtaagtgctggctgcgaatagacatgcttcggaacggatagccattgcgatacctttggtcattctgatcttctcgttgagtgttgtcagtcgccaagggaggttgctggattgcaaagctatttcgcaatcatctacaatgaatcgggcacagtcttcgaaagtaggacgtgatagagttgaataatcatagtctaaaccgtatggctctttctcaataggcacaggaccataccatttcagtaactccatatagaaataagcacggagtacatgagcctctgctacccaacggtcacggtcgctttctcttggtatggcggcggtggctgcccgttggaggaatgtgttgataatacggatttgcccccagtataactgccagtatcctccttctgagtaggtgtcacccatatctctgcgaacgtcgagatagaagtcggtggtggtacagttgccggatgcggcatgtgcaaagccggcaccggaaccatccgtgcaatcccacgcttcatcactaagtgctacgggatagttgctccagaaatgatatcgtaaactctttttaggcagatagtcaaagcaagtactgaaataagctttagtcagatcgggatcttggaatacttcgtccagtgataatcttccgtcgggagctacatccaacgcttcattacaagaactgaatgtgagcaaggaagcaaacatgcatatataaatcaatctttttttcatatcggttttgttttagccgttaaaatgtaatatttaaacctacattgtacgtacgcattgttggataggctgccggactgttttgttcgggatcgaagctgtcagtcttcaggtgagtccatgtatacaagttgttaccacttaaatagaaacgtacattggaagcaccgattttcttgctgatgctttccggtaatgtatatcctacttctgcatttttcagacgtatatatgaggcatccatgataaagaagtcgttgggctgcaagctcgggccgccactgctggacagacgaggatacgtaatcttttcgtgattattatagcgttcttcgctccaacgttccatgtgcatcttgtaaaagttgccgctgctttcataaataccggctcctgaataagtcttgctgtattggcctactccctgcaacatgatagaaacatcgaatcctttccagttggcagataaagagaaaccgtagttgatgcgaggcaatagggaggaatagccaatgggagccttgtcacggtcattgatgacaccgtctccgttgagatctttataaataaagtctccgggttccggtgttcctacaccttcataagtcagtccgctcttggcaatactctcgtcgctatagaagaatcctgtgccgtcacgccctttttcaggatcatagctgtggtcgatgatatatccccagttttgtcctaatgagaagccggtggtgcgggtgcgataagcataatccttacctaatagtggctcgtcatattccaatactttgtttttggcataactgaagtttgcattagcagaaacagatagcccgtttttgaattgtttctgatatccgaggaccatttcgaatccctgattctttacttcaccatcgttcatcagtggaagagcggatgagggaagaccttgaatcataggagtagtctgcgggataatcagaatattttttcttttttcaacaaagtagtcaaatgagaaggaaagatcatgatacaaggatatgtctataccataattctgtttttcagctgtttcccatgtgatgcttttgtttcctatgtagttttcggctatcttgtaaccttgtccccaaccggaaccattggaagcatatcccaagcttggggataaccaatgatctcctttactgtcggtgactacggaatattgactgatattatccagataaaggaaacgggctgaaccgaaggcgtcgttaccaacttttccccaagaagctcttaacttcagattggtcaaaaccggattatcctgaaggaagccctcattagtaatcagccaaccgaaagaggcagccgggaagagaccaaatcgtttgtccggtgaaaattgttcagagccgttataacctacgttgacctctgcaaaataacgtctgtcatagtcataagttgcacgtccggcaataccgatgacgttgtaaggaagcagtaggtcaccggatgtttctttggattctttgatgtcccgttgagctagaaacatagcagtgacattatgctttccggcgaaggtctggttatagttgatttgtccctgtaagttcataacccaataagattcggaagactttgtgagttcaatcgggccgtcttcgtcctccaggctaggatggcgattgataaacaaatgctctcctgaagctaatgtctgatacgtataccaggtataggaacgttttccgattgttttcccaaatcctttggagtcgaaagatacctggcctttgacagagagccctttagtgataaatcccaaatctatttctactcctccgataacattgattcccgatctggtttccagttgatagcccgaacggttgattagcggatatgcactcaatgaattgttggcgggatcttctacggataatccggcaccaatagggaaagtacgtatagcatcagtagcgtatgcaccttccggggtgagatacatggaagtagggcgtgaggtcaaagcgctgttgaatacacttgacatacttgcggaagttccgttgatccgttccagataagaggaagcgtttaagttaatctttaccgacttattgactttgtagtcgatatttgagcggaagttgtagcggtctaatgaagactgggcattgtatcccaacctggatttaggttctacgttgaacatacctccctgatgcagatagcctgcacttacaaagtattgaagtttgtccgaacctcccgaaacgttcatgttggctctggtcatgggagcataatctctgaacaagatatcttgccagttattattcggataaaaatccgggtctacaggattacctgttttccatgagtcgaacttatcaatgtccggcccgaggaattcagcggaatttccgtcgttcacgagtgcttcattgcgaagtctgacccagtcccatgaatccagacgttcgggcttgaaagcgatttcctgcatgctgaattctacattggcactgatacgggcagttcctttttcacctctacgagtggtaatcattatcactccgttggcaccacgtactccgaatactgctgttgcggaagcatctttcaatacggagatattagcaatctcgttcgggtcgatagatcgcatatcgtctacagctactccatctaccataattaatgggtttgttccgtttgtagtggcagcaccacgcaggaacatggtgacttcgtcacgtcccggttcaccggaggtctggatagttgtcaatcctgggagttttccggataaagcggaacttaggttgggcgatgaggatttcatcaaatcttttcgatcaatggaagctacggaaccgatgacagaaacctttttctgggtaccgtaagctaccactacaacttcctccaggttcgctacgtccggatgcatgatgatacgcatgtcttttttagcaggaatgtcctgcttttgataacctacataactgatttccagtatagcgttgggggcaaccgataaagagaaacgaccgtctatgtctgtaatagtaccattcgttgctgctcctttttctatgacggaagctccgatcaggctttcaccggactcgtctacgacgactccagaggctgttattttagactgttgctgtgtcagggtagcatctccgatatccgatgcatttcctgtaacgggaatacagattcccaacccaagcaacaggcacattttgtatagccaataactttttttcataactataacgtttaagattgttttctgtctaattaaatgaactcaacattttatccttgtcgtatcctatgtattcatagcgttctatccggacaccttgattctttgcggtaatacatgggcttgtgccattccatgggctatccatccaccattcttctactagtagcttcctttgagttgaagagctgtcggtaaatgagaactgaacttttgaggcatctacagctccaccggagtaacctagtacggaataagtacctgccagattacgcagatcaacataagtgagcggacaaccggatgcatttagtgatgtgatggatttgcaccggtttatatccagatatgctaatcccggattgttgctcacatctatagaggttatcatatactgatcgccagaaatgaatttggttaatcctgcattcttggcactgaaagtctgaattcctttctcatctaccggacctgccgtgtagctggtactgattgcgtatttactaagatcgatttctcccagattatttccatccagaatgaggtttttgtatccgcagaagtattgtagtccttccagattagtgattcccttattgctaagatcaagggtcgtgttattcctgaagtattcagtattcagagcagccactgtcagaactttatctccatcgaatacatccggaaccaatgctttgagtgcgtttcgcagattgatatcaggaatttctccgtactttttcattgtcttctgatattttccgtaactgtaataatagttgttgtttccatcgggatagtcgtgcatccagtcgtacccttccactgtcactccattattgatggcatctacgatagaaccgctattgctgtagtatgagtccatccaccaggattccattttcaggagtcgttctttacttgcgtcatcgctgaaagtaaatttgaagtctgtgctgttgtagttcagacatccgccatagatactgtggtaattgcgtacatccagatataccagtttacagtttagagcagagaacttctcaatgttataacaataatacaggtcgacagattctagtttggtacttccatctatgttgagagataccaatgtcgtgttcggctgttccgaagtggctagttccagtttggtcagaccagtgttttgtgcagtcagttcagacagtctggatagtacttctgcaggaatttcactgatatcattattgttgcagatcagtttccgaatgttgctgaaatattcgagtccctccagagaagtgatatttttatcgctgatatttagtgtgccatcagtgaaagtgacatatttagcactggaagatatcttttctcctttaaatatatcagggaaaagagcagacaaggcattacgcaggttttcgtcgggcataactccaacagtactgttgatgacgcctaatgttcgcattttgctaccgcgtaccaatacaagtccataagaatctttggtggccgtagaggggtaaagtaccgtgatatgatcggattgtacttctctggtttccatgtagatgggctgttcggttcctcctgaaaggggagaaagagccagtacatcacagtcgataaagccatttccctgaatggtaatctctgtgcccagggattcttccgaaatatccggaagcactacattggttactcctaggtctgtgcctaacttttcgtcttcacatcccaaaaggaataccattccaagcattaataaaatgtagaaatgtgttttcataaatactatttgtttaatgaataaatagagtacatagttattcttgttttaagacgatcacagaatgagccggaagtaaacatagaattttatcgttcactttgagaggctgggcgtccggagccaacatttggtctgtggtaggtaaaccgtctttgatataacggtaaacctgataattccctttggtttgcgtatgttggttgattaggcttattgctttctcctggtccattccattggcgaaaacatatacccatttgccatttgtgtttcgaacagcagttcctgcataccattcttccggtgttgctatcggatagatttcagctcccgggcgtatgaaacgtgtcaacagagaataggcatagtactgtgggcgtacctcgtaatcacttttgatatcgttgtagtatggttccgaagcgtatgttttctttacatacttccataaacccagttgctgcattgctccgtagtctgcatccttaccatagtattggtctatcaggctccaatagctaacaccgcttgctcctgcattgagtagattgatggctatgcgtgtcatgagtactcctcgttcatacaagtcgatatctttttgtctggtggcacctacgcattgattacctccgaattcaccgatgaaatgggcttttccaactgaagaggccaattgagagttttgtttttcccaatccagaattgtggagttcggagtttcgtagccgaagatataggtgtgggagttgaatacgtcagcaacgttcgccagtcctttcgtgcaggctgccagatatttatgcgttcctgtacctccgtctgaattgtcagaaaggctgaaatgtactttatttcttattccatcctctttgaaacgtctgtcgagtactttacacatttcaatatagtcggcggtgggagcagctttacctttgatgatatatgaccaatctggttcgttgatcggagtaatctctttgacgcacgtgtattttttgttgttgagcaggtgttgtacaagtgcggaaaagttctcgctccattcttcatagttagtcggggctactacccagttaccataattcccttcggccaggaaatgtcccggaggggctccccaaagtacaagggtgacttccattttctgttcttgtgccatatccaatactttgtagagtgattgcatttctacagagttgaaagtgaaattatgccagtcgattttggatgcatccggattgtcattctttggctcataccattgtggcatcaccatcacccgtaagctttgcagtcccatttctttgacacgtttcacaacgatgcgatcccagtcttcagctttagctccatcattgcgggtcacattttgtgagagaaagtggggatctagttctgcacctatagcacggagctttacaccggttttctttcctacagaaagtttctgtatggcagttgttgaactttggtatttgattatcagactactttgcgggttatccagtgtcagcgtgaagccgttagccagttctttaccggttttctttatagcttctcctgtatctttattggtgagtatataagtgtggtcagggtgtagccctgataaattgacagtatagctcttgtccggattgtctttgcggcggaaagctacgatgtatccgctgtcatccgacggacgataaagttggtatgctagccagatattttccgaagtaatgttgtttattccactcaacggatagtaatcttcatagaaataggggcggagttctttgaactctgcctggcggtcgcgcatatcatagatggattgtccggcttcggttattttccagttgtagataatagaggttccgaggctggaacggaaagtgaatttatcggcactcacagttcctgtaccatgcaggggaaggtataagttcaatccgtaagtatggcattgatagccgattggttctccataactgtaatctgttctccacatcggtgcactgcgtgagatactttcgaggtcaatacggcgtccgccactggcacaattatcaaccagcaagcccggaaagcggttcagcagatattcccagaaagaataaagtccttcaatgtatcggatttcgcagataccttgtctgccaggttcatcattggcagcccagaaaccttccggctctatattgaaatcctggcggtagtagtctatgccattttcttcgaggaagtctccgatatatttactcatccatcgacatgcctccggatttccgagattgaatagataagagtcgtgctcactatcttttgtccagtcttcctgtttggcttttcctctggcatccaacatccattgagggtgttgcagtgcccaagctgagcctttcataacacgctccggttcaaaccataccatgaacttggaaccaactctatgcacttcgtcggcgatggggcgtaatccttcggggaaacgaatagagtcgacggtccagtttcctacggtgttcgcccaattcttatgattggctacatctgcagagtgattgtaccatccggcatccagccagaatacttcgggtactaatttgaattgttcataccgtttcaccatagcaatggcataatctgtagtcaggcaggtatattcattacagggagtaggatcaccgtagttgaaactggtcgatattggatatacggtcggtttaccacctactttccaagtgtggtgggcttgcacgaaacggcggaactggttgtgtcctttcatccggtcggaaccgttccagaatgacaggcatacactggaagtgcggatgctctcttccggatacagataggttttcaaacgttcaattccggaggtaagcgctacgctttgctggtctgcacagcgcacatcggcaaaccaggttcctgtccatccgatggctacgataactccttgattagccggagattcaatattgaagaatggcatacgcatttgtgaagagcgtccaccttccggtctcatataaagattatcacccggagacaagattgtaagttgctggctgaaatctgatttggatgcatggctgccttcggaatgatgaaggttgaatgctcccggatgctggtagcggaatgtgatatcagacacttttatgttggcaatctccggcgtatttttctttccctggttggtgaaacggagtacccattccaccgtattgaagtcggtaaagcctttcacttcacattcgacttttaatcctccggatggttcacgataagtataaaggtatttcagaaccttgggatcgtcacttttctgacgcgtagccgtataagaccagcttttgataaattcctgtgaaggtttacctccatattcgaaagagaaaggagggaccacaccgcgggcaaagtgggtggttatccattggctggtgtttaccgggcggtcgctcatgcgggctaccgtctgtcctgttccattatgagggaacagaagcagaatgaatagataatatagtattctttttttcattctttattcggtttttcgttggtaactttatattttagtaataaggaactatgtggcttttcgaggatcagtggcaactgactggtcagttcttttccctgatagattttgctctgtcggctatccatgtctgtcactgtatagtatttttccggatccactcctgaaagtctgacggtgatttttttgtctttggaggcggttctgcggaaagcaacgataataccactgtcgtccgacggacgatgcatttgataggctagccagatattatcccgcgtcatgtcttctgtacccgtcagtgggtaataatcttcgtaatagtaaggtctgatttcgtggaattctttcagacaacgttgcatttcgtaaacggaggcatttttatcggttattttccagttataaatcaaagctgtgctgacgcttgagcggaaagaatacggatcggtctgtaaactacctgttccatgtaaaggtaggaagaaattcaggccatacgtgtgacattggtagccgtccggatcgtcgtaatgataataatcactcctccatagtggtgcgcttcggccgattgtttcccagtcaatacgtcgtcccccactggcacagttgtctatgagcaggttcgggaatcggctcagcagataatcccagaagtagtatagtccttcgatgtgtcgtatctctttcattcctgtacgtccgggctcatcgttggctgcccagtagatatccggctgcatattgaaatcctgacggtaatagtctatgccgttttcttcgagcatatcgcctatatatttactcatccagtggcaggcttccggatttcccagatcgaacagtaggtaggtgtcattgttgtgttcgggaatgtcgagcatccagtcggggtgttctactgcccattgggtaccacggatgacacgctcgggttcgaaccagaccatgaatttagctcctactttgtgtatttcgtcggctacaggacgaagtcctttggggaagcgcaatgtatctacagtccagttaccggctgtgttggcccaggtcttgccatgttcgaagtctgcagcatcggtgttccatccggcatccagccagaatacttcgggtttcaatccgaactgtatgtaacgtttcaccatggcaatggcataatcggctgtcaggcatgagtattccgtacaaggtgcggggtcccgatagttgaatccgctggaaagaggatattcggcaaattttccgttgattttccgtgacttgtgtgccaggacaaaacggcggaatttattgtgtcctgccatccggtcgatattttcccaaaacatcagactgatacttggggtacgaattgtttcctgtggacgtaagtataatttcatggttttcattcccgaagccatggatattgtacgattatcttgtgcgcatacatctgcataccaggtgcccgaccagcctactcctaatatgactccctgtccggcaggtgattcaatgttgaagaaaggaagatagtccccttctgaagagcgtcctccttgtggagacatctgtttggtttcacccgttgccagagtaaccgaacgtggatggaaatcatatttggagatatggtttccgtctgcatagtgtaacttgaattctcctttagaagcgtattgcatggcaaggtccactactttcacttgttccagagtgggagagttgctcgtacctttgttggtgaagttcaatacccattcggcagcctgataactgggatagccttttacggtacattctactttcagtccgttggtaggattgtagtaggtaaagagatactttatcacatccgcttcttcggattctatcttttgctgggaatagtcccattggcggataaattctgcggaaggtttcccgtcacatataaacgagaacggaggtgtttttcctttagcgaattgtttctgaatccatttttcgatttcaggaatgtgtttggagattttagccgtcgtctgacccacggctatgatgctccacacactcataatcagtaatgagaacaggaatttcgattcgattttcttgaaatgtttcattagaatataggtttatgtggtttttatttttctcattattccgatcagatagcaccatacaatggcaagtactatgattgcagataactgactgtggaatgaatcggtaattactcctaaaataggcgggaggacggcaccgccagatacaccgacgataagaagtgcagatacttcgttcgctttctcgggaacacgtttcaaagacagagagaagatgatggaaaacagattggcatatcctatcccgaaaactgctacacatccgaggataaaccagagattagtgctaatggtcatcagtatcaatcctgcgagagctatccagacgctataaatatagaatttactttctgaatatttcatcagtaggataccacccaaaaaggctcctacagtgcgggcgaagaaatacacactatttcccattcctgcatctgtcagtggtagatcacaacgttccatcaggaatttagggaaagtcatattgatacctacgtctacacctaccagcacgagaataccgataaagaaagcaagaatgtatttgtctttgaataattcaagagtgactttgaaagaaatgttcttccgttcctgttgtttttcttgtataggggtaagccatagccatatcaaagcgagcagtgacagtccggcataaatggggaatatcattttccatccgaaaaaactaccagtcacccaagctgccaggataggacccaggaatgaactgactgctttgacaaattgtcctagggttaatgtacctgtcaacttatcgtttgcaacgacatccgttactaatggattgagtgaaacttgcaatagagtgttaccgatacctatcaaggcaaatgcgattaatatggcggtaaagtcgtatgcaacgagtggaaggcacatggctaatacatggaatgcgaagctaagtagtacggttttcttgcgtccgatgcgattcattaacattccggtgggaatagaaagcaccaggaaccacaagaaacaggatagagagatgagattaaccatcgtatcggtgagatggctgaaatcattcttcacatagctcgtggttattccgacaatgtcaacaaatcccataacgaagaatccgaacatgacggagagcatttttactatggatatttcttttttcattcgtgtacttttgatgataaattacttggttggtgggcatatatatccagcacggtggatatatatggctaacatggtgaatatatatgcccaatacggtgtatatatatccccactaaatggggtgtatatacttctatttttgtactaataccctgattgatgaacgagataatttaagttttaggttattctcttgcgtgttgaccgtttctgttgattctataagattatcaccttccggtaggcgtccttccatatatttgtagacattgtattctccattggcaccttctttatcattttccaactgtatcatcttgtctttgtctgtagcgttggaaagtacatacgtccattttccctctgtgttgagaaaagcacttccggctatcaactcgtcgccgagatccaatggatatacttcgtcgccctggcggacaaaacgtgtcaacagactatatgcatagtattgaggacgtacctcgtagtcttccttgattttggaatatacatctgggtcttcggtataagcggattttagatatttccataaaccgagttgctgcatttccgaataggaggcattgcggttataatattgatcgatcagactccagtagcttactccgcaagcaccggcattcagatagttcagagcaacgcggattatctgtacccctcgcgtatacgtgtctataccatattgacgggcacttccgtatccaggaaaaccgaattctccaacaaaatgtcttttacctcctgcagaagctatattttgacgttcccaatttacgagagtcgaattaggggtgttgtagtcaaacttgtatacatgagagttatacaggtcggcttcatcgtttgtgaaagcggaaacacaggcggcgatatatccgggtgtaccgtctgtattgtcagaaaggttgaagtgtaccttactgcgtattccatctgctttaaacttggcatccagtgctttcaccatgggggcgtaggtgtcctgccaacccatggtttcaaaatcaccttgccacatgatgcggccgtaacctgctatatgactgtcaggttcattgaatggagtaatttgattgatacaggtataatgcttttcttcaatcaggtatttcaccattgtggagaagttttcagcaaattcttcatagttatctataccggcaatccaacccggattaacgttataacttcgtgcatcacacaagaaatgcttttgaccattgttaatgcctgatagtaagtcgatattggtaatggctccccatacgactaatgtcactccgatattattctcctgggccagatccaatactttgtatacagattgcatttcttccgaatcaaaagtgaatttgctcatatccgcgacattaggatcgttgttgtcattggagggttcccaccattgtggctgcatcatgattcggaattgttgtactttcattttctttacccgttgtacaactatattttcccaatcttcagcctttgaaccatcattgcgggtgatgttttgtgagaagaagtgtggatccatctcgacaccgatagcatgaaccggagttcctgttgaattccctactgcaacaggataatagttgcaagccgggcaatcgtcatatttgttataatcatccgagcaggcggacattccccaaagtgtgcaaacaatactcaatagagttttactgatatgtgtcattttcattgccatattgattaaatttagtaggttattattcaaagcctaattctgcctcaattgcctgaatcagaatgtggataactttgatgtgaatttcttgtattctgtcggaatgtgctgctcgtggcgcgcagactgcaatgtctgccagtcgtgacagttcattctctccttttgaagtcagcgctatcactttcattccattgttgtgtgcttgtacggcagctttcagtatgttctcggaatgtccgcttgtgctgatggccaataatacatctcccttacatcccatagcttctacatagcgggagaagatctcgttgaacgaaaaatcatttcccacacaggtcatgtaagccgggtcattgattgcaattgccggtagcgggatgcggttgttgcggtaacgtccggttagttcttctgcaaagtgggtggcgtcacataaagaacctccattaccacagctgataatcttatttccggcttttaatgcttcggcgcaggtagaggctgcctgtgaaataatcccgactgttgttgtttcctcaagaaagctctccaacgtttgccgagcctcttccagtgttgtttcaataagctctttcataatagttaatcggttaagttagcggctacagaaagagctgcataatctcctatctgctctcccaaggcggctggtttcactttacatactctgtttgcacaggataatgcttcctgatcgattatcttttgcatgatgggttccatcatatttttattccgggtatagatgccacctatcacaatgacttccggattcaagatatcgatcaccatggataatccttttcccagataaatagcagacgtctcatatatgctttgggctaatttatcacctttggcagcttcttcagccacttttcgggcagtaagctgatctagttcctgtaaggtacaccattcaactttctgtccggtctgcaatttctccatcacatacattttggagagttgagcaatacctccaccgctggcaaatccctcaaaagagccctttttaccgtaacctatcggaccgaaatccgacaggcggatatgtcccagttctccggcattgtcattggtgcccgtatacagtttgccatttaatattaatcctgctcccagtcccgtaccgaatgtgagaaagaccatattcttagttccttttcctgctccgaacttccattcggctaaagcacaggcattggcatcattgtgtagattggttttaatgcccgtctttttttccaccattgccacaatggggatgttgtcccatcccggtaggttagggggagacatcacgatgcctgtttcactgttgagaggacctccgcaacagattccaatcgcttttgtgttagtaggggttagctggtggaggttcatcatcttttcggtttcacagagaattctgtctattgtttcgtcgactgtggtcgtatcaaatttctttttgtcgatgatatgtagctcgtcgttttctttgataccgtagatgatggcgcatttggtgcctcctacgtcaattcctaacaagttctctttcataactattattttttagcgtataatccggttttttgtaacagccgcttgtattctttcaagttgaaaggtgccttgccgtataggtaatgattcatgaatttctgattaccgatctggtattggatcagatagattccttgaccgctttcttccggtagtgaggctattctgaccttttgattggctggaatacggaaagtgctctcatagattttacgtcccgaggatgtatctgttaccgttacattaccactttgtacgttgcgtgtgtcattcgttcctatcagtgggtaatttccgccttctgcatcattgattagtacacaaacatcctgttgaacattcttgatgaaataatatgccatcttctttgaattgtagtagtcaacaatcgcatcagagatcactggccatccatcccgcaggttccaccagacaataccagtcttgtcgtcaaacttctttccacgccacatttctatgaaatatttcatagcttctgcctgtacggattgagaagcgaatataaaatcatccagtttggagggaacttcaccaaaaagtaaacgtacctgattaatcataagattattgcgatcgaatgtctttccccattctgggaatctacgaacagatttggtaacccattcatcattccattcatgattttttgtccagggatatacggcatcttttgtcatcattttctggagactttctaaattagggcagccgtgatagccgatttcactgacaaagcagcaggtagcatccgtatagaatttgtctttgtaatatcctctgggaccccataaatggttttctggtaaatattggtcagcacttcctctttcatataccgcttggctgtagtaaggagagctgggaagataagggcgagtagggtcaaactcataaataactgccgggaggaccttgcggctaactacatcctgatttggattaatattaaatggttgcaaagaccagcgcagtgcacaatcgtcttcattatttcctgaccataaaacgagtgatggatgattgcgtaacttgcatacaacggaaatggcctcttcttccaatgcttgtgtaaatgagctgcgttgaggatagaaagtgcatcccatcgtaaaatcctgccataccataatgccgttttcatcgcataaattaaagaaatgatgatcttcatacacgttgccaccccaacaacgtatcatattgcagtttaattctacagccatgcggatagattcgtctacgaaagaatgatcccggctatggagtgcatccatgggtacccaattggttccgtgaataaaaataggttctccattgactatgaaacagaatttacccggatgatccggtgggaggttgatgtctgtaatgtctagttgaatcgtgcggaggcctacccgtttattatctgttgataaaatagtgccgtcagaatctactaactctacttttgcatcatataaagccggttctccatatcctcttggccaccataaatcagcattcttgatttccattatatatcggaatgctggggaaacgacaacagagcttcctttatatatttctttcccatggcgacttaatgtatatacggctttcactttgtcgaacttttcgaaaggtagttttacttgtacatcagtatacaaacgtacatttctggtagcagtgtctacattggcgaccatatagtgaacatctgtgagacgtgccggattcaatacgcgtaattctacatctctccacaaacctgcactgactaatcgtggcagaatgtcccatccataggtgtgcggagcttttctgatgaatacggattcttcagacgggaagtttccaatactgaatgtccctaacagatgtttttgtccttcaataacagatgaacggagtatcacttggagttgattgctttctcctgcttttatttctttagttacatcaaaagcatgttcaatcatcatattttctgctttgccaatgtgctttccattcagccatatatcggccagacagtctattccggcaaagaagagttgatattgttgtcctggttttagttgtggcgctacgaatgatttggaataacaccattgatagccttcccatttgcgtaattcatttacattactgccaatcatcggatctttaattaagttggcagccattaggtctagttctacattaccggggacttgggctgatagatgtttcacttcagctagttgcatgtccttgggcgaagttataggttcttcaggttgcatccaataagagagttcccatgttccatttaaggagatggaactaccggaatcggcaaaaacaccacttgtacaagtgagaaatatcaaaaatagcagtgtactgattttattcattgttaatagatttgattgatggtgtgacaaagtaactagtgttatatttttatagtattacataacggtctcatttttgcttctttatatacctctattaaacctcctttcttttgtttcaattaaaatgtgagttgatgttttcctgaccttaaatctatctttttaccattatattctactgttgcattcgtattgactgggatcgtgactttgagaatcacttgttctcctttacgttcccattcagaacgaatgattccgtttacagatttatattctgcttttacccagtcaagaccttttacgaaatgaggttggataagaatatgtttgaatccgggtttctgttcatcataattaatgcctgccaatatattgtacatccatgcattaatgtctccaagaaacatgtgatttacggaggcatctctaaattcaggtgaaagtatccatgtttctgctagtgtagtgaaaccttgttttatccaattgccccaagatggagcttcttcttgtgcggccatctgatatgccaagtcagcatatccatatttggaaagcatccgcaggactgttttactgcctaaaactccaaaatcgagcaggtttttattggcttttatcatcgtagaaagattatctgcaacctgctgttcgtattctttaggaacgattccaaggtataaggcaactccttgtgctgcttgcgaaccattggcataaatagctttggatgtgtcgaagtatttgtgattgataagcaatttcaattcttctgctttcttagcataactactaccatcttttccaatgagttctgcaaatttagccatatacagattgtctaaataataatagcaggtagtggtgaattctgtaggggtttgtgttttatggaatacccagtcaccaattccgtaagttacggttccttccgcgtcctcgcgtcctgcgaggtaggcaaggtatttggtgcatacaggccatagtttttcgatgcttcttgtatctccatagtagtggtaaattgccattggcacgataaacatggcagcatcccatacaggacctatccagtcatcatagccccatccggaactaggaatgattcccgatatacgtccttcttcattttgattatcaatcatatcatccagccatttttcatagaaagtaataccatcgaagtttaataatcctaaatccattgttatgtgtgcatcggcagtccatccatttttctctcgttggggacagtcagtcgggatactcatcagatttgataaatatgattgattagcagctttccatattttatttaatagttcatttgaacaactgaatttaccaacaggaggaacagccgtatgtatgaattgagcggttaagctctctttagtaagttttacaggacgatctgaacgaacttctacatattgaaatccatgatatgtaaaatctggagtgaatgtaccttgttttccgtccaatatataagtgtctgtttgaaaagcgaggccaggtaatggtttgtagtaaatatctaagttgcgcatttccaagcgtccgttatcttttagcaattcgccgtgttgcatactgactttagtgcctttcttgccattgatagaaagagtacagacccctgacatattaactccaaaatcgtatacatagactgtatcaccaaaagaacgcatattgattggagtgataaattgttccgtttcaatagcaggcatgttttgtgatactagtaggggagaaggggcagccacctgaattgcatttgtccatttagagtcatcaaaacccggtttgtcccatccagcaattgcaagacatgcatcataggtatcaccactataaatattgttttgtatataaggaccggtactcgttttccaagtagaatctgaatggatggtttgcttttctccatttttatataatatctccatttcgcagatcattcttgggcggttacgccagcgggcttgctcatagctccatgttgctacaggggccgattcgttgtagaatccgttcccaagtattgcagatagtacgttctctcctttgagcagttgtgaagtgacgtcgtatgtgttatacagatttcttttatcataatgagtaaaacccggattgagatgtgatgatgttattgatttaccatttaatgtcattttataatatgcagcggcacttacatataatcttgcttgttgtatatcatcttgagcgataaacgacttgcgcaacatgggcgctggcgtataatctttatcatgattatcagtaatccatactcctgtccagtcactttggttgagttgagctgtttcaaaactggatataggagagataatcttatgttcctttgttttatcccatgctattacttgccagtaataacgagttctggatttcaatttttctgatccttgataggtcgcatgaggagtgtcagagtaaatagtgtcagattgccagctattatcggatgagtttctcaaatcttgttcccgggtggcgatatatagctgatagctgtcttgagaaaactctgttgcatcttcattattggttgtgtaattccaagtaaaacgcggtgctggtgaatcaatgccaattggagaaatttgatattcacatcgcatattttcaatatcaatgttgttactgctgcatgcccatactagaagtcctaatagagccagcatgtatttttcatttttaatttggaacttcataattctgtatctttatgttaataattagagggctattttctttattgttacatttgttaatttgatatcattatttattttcactaaaccggttaagtgattgaagaaaaaatgtaaaatcatgactagggtaatgaacatggcaggacaagtgtttctacttcttttttttcggtcgaattttccaagcgatatttgatatcgccaagtagaatccttacggcattcttaccgatctcttctattggcattcttgcgatgttcatattaggtgctaagacacggaatgctgatactccatgaatacaagccaattcatatcctttatttatattgattcctttttcataaaagtaacggaatgcttccagagccaaaatatgggttgtgaagaagaacccatctacatcaggtactttgctgaatatttgatcaagagtcttgaaaacattcttctcataatcaacaaaggtcacctctccatatagatcaggatcaacgggtaggttggcttcaattaaagctcttgcatacccttctcgtctcatattcattgtgcggagatgaggattcgtggtaataatagctattttagatgaaccgttatcgatcattttctttactaactcgtagctactgccttcattgtcaataatgatgtagtttgtctgcatctcaggaaagtagcggtcaaataagactaatggatagccttctttgactagattctgtatttcaattttagaaacttttgtgggggctactataattccatccacctgtttcgctttgaataaccggatcattctgttttctctttctatttcagattcagagctacaaatcattaatgaatagccttgtgtttccgcttccttttctatagaacgggcaactttggagtaaaaagagtctgtaatatccggtatgattaatccgattgtgcctgatatacccgtatttaggcttctggctaataaattaggctggtaattcaactgtttggcgcattgaaagactttttcttgtgtagcaagactaatacctttttcatcccccttaccagaaagtacccaagagattgttgtcttggataattttaaggtttctgctatgtctttaagggatgttttcataaacagtatctatttaatcggttaagtgatggcaaatatatgaaaaaatatctcattatataatagttgagtaatatttaactaaatattattttttgatataataatttgcaatttaaaaataacatagaaataaggtgtaaaccaaagaaagtaactatatttgtatcattcaaacgaaagatatatgaaagtaaagaaaattagtgcggctaacgtggaggcttgttcgcttcctaaactattcgatgaagaaaaaatagattttcagtcgattcagtgtgtcaattgggctgaatatccttacaaacctaaagtgaattttcgaattgctcacacacagaactcgattttgctacattttaaagtgaaagaggagagtgtacgtgccaagtatggaaaagataacggttctgtatggactgactcctgcgtggaattcttttccatacctgcaggcgacgggatctattataatatagaatgcaattgcatcggaactattctggtgggtgccggacctgtgcgtaacaaccgcgaacatgcaccgaaagaggtgactgctcttgtacaacgctggtctagtctgggtaatcagccttttgctgaacgcatcggtgaaacggactgggaagtggcccttattattccgtattctgtgttctttaagcaccagattgattcgctcgacggaaaggagataaaagctaatttctataaatgtggcgatgaattgcagacccctcatttcctttcatggaatccgatacagattgaacagccggatttccaccgccctgatttcttcggaacgttggagtttgaatagtgaattgaatctttgaatttgaatataaaaaagaaggttgatacttgaaaaagtatcaaccttctttatatggactcactttgtttatttcacaatccctctttccgagttcttcacgaaatttacaatattctcgatctcctcactcataggaacctgatcgatgatcttctgtacagcatcctgaacgctaaaattaccctgataaatcaaacggtatgcgttggcgatgtgacggaggactctttccgatgtattgcgatgttgcgagagaaccacagcatttacaccgtgatatgccaccggatttcctgacatgataacgtatggaggcacatccttagatatacggcatccactttgtaccagtgtccagctacctatatgacaatattggtgtaaggtgacattgccacttaggatagcgcagtcatccagcatacactctcctgcaatggtagtacctatgcctactacacagttattgctgatttgtacatcatggcaaaggtgtaccttatccatcaggtagtttccatttccgattttggtagcattgccggcaaatgtagcgcggctgattaccacattctcacgaatatcgttgttatctccaataatcaggctactttcttctcctgtgtagtggaaatcttgcggttccgctccgaggacggcattctgatgtaccttatttccttttcccattttagtaccttgcaagatactagcgtaagacatgatgacgcagtcatctccgatctctacattcttttcgatgtaggcaaaaggcagaacagttacattcttgcccagctttgcttcgggatctacgtaagctaacggactaatcataatagtatatgtttaaagttattcttctcttccaccacccagtgcctggtaaaggcttactactgcctgcattcgatcaaagcaatcagaaacctgagagatttgtgcgctcaggtaagactgttgtgcagacaatacttccaggtaggttgaggtccctaagttaaacaattcttttgtatcttccgaagcttttttagcagattctacctgcatttggcgagattctaccttttcactggtcttttggtataaacttagcgcattgctaacctcactaccagcattcaataaggcttgttggaaagataatttcgcttgttcttcctgcgctttagcagctttcaggcgagcgatgttctgtccgcggtagaacaatggctgtgtcagtgaaccgacaacagaggccaacaatttgccgggattaacgattccggctcctgaattatttgtccatcctgctgaaccgctaagtgtgatttgcggatagaaagcggcacgagccgagttggtattataatagcaactagccaatgacatttcggctgcttttacgtccggacgattggataatagctgaataggcacaccggcggaaagttcggttggaagtacttgtgcttccaattcaccacgcttgatggcatggggagcctctcccaaaagagtagacagtgcattttccgtttcgcggatactctgctcgatatcaggaatactggcaagtacctgtgcgtaagcggctttactttgttctacaccagctgaattgatgctatacatggccgcatctttcatggcttccatcgtttctgcattctttttcagaatttctgctgtagccttggttatttccagttggcggtccaacatcattaatgtataatacatattggcgatgttagagacaacttgtgtttgtactgcctggcggtaagctttcatttgcttcagtgtaacttgcgcatttcgtttcgagttcagcaactgaccgaataaatcgacttgccaactggctgtgacaggtaatgaataagtttttgtagctgcattcttgtcaaagctgctgatcgttccttgcggagacaatcccaatgacggggcataagccaggcgtgccgacatgagggatgcttctgctgctttcacattttgagcggcggacaagaggtccgtattttgtttcagtcccgtttcgatgagagactggagttgcgggtcggtgaagacttctctccacggcagattaccgaagttggctgtatccgaaaccagtgtatcattatccgctaccggatcgcgatacaggccggaagtggtgatatcttcgggtctgtcatacgacttatagatgtggcagctgctcaagagagcagttgcgcacaacatatatagaatctgtttcttcatatcgaatttcattatttagcgtattgttcaatctctgttacggcatctgtattgtcgatatcttcccattccatcggtttaaccttctcttgtaagtactggaagactacaaacagcgcaggaacgataaaaatttggcaaatcataccgattaacataccaccgatagaagctgtacccagtgtacggttaccgtgagcacctacaccgaaggcaaacatcaacggaagcaaaccgactaccatagccaatgatgtcatcaaaatcgggcggagacgggcaccggcacccaatacggctgcccatgtgatactcatacccatcttacgacggtcgagggcgaactctacaatcaagatggcattctttgccaacagacccatcaacatgattaatgcgatctgcatatagatattattggacatcgtacccagaatcatcttcaatgccgaaatattaccgatagcacttacaccgttcacaaacaggaagctgcctaacagaccgaacggaacggataacaatacagccagcggaagaatgtaactttcgtactgtgcactcaacaataagtaaacgaatacgaaacagagcacaaaaatcagtccggtagcacttccgctactttgagcctcttcacgcgccatacctcctagttcatacgtataaccggtaggcaggttttcttgagcaacttcggcaagagccgtcaatgcctgaccggatgtataaccacttgccggagctaccattactttcatagaggtataaaggttgaaacgactaataatatccggaccatatactttctccacagaaatgaactgggcaatcggggccatctcgcctgcactattacgcaccttgatattttttaaagattccaggtttttgcgtgataacggatctgactgaatcataacacgatacatcttaccgaaacgattgaagttggatgcgtacaaacctccgtaatatccttgcatagtagtgaggatatcgctcgggctgatgccagcttttttacaagctgccgcatcaatgtcaatcatgtattgcgggaaattcgggttgaaggaagtctttgctgaattaatttccggacgtgcttccaatgctgccgtataatcattaaccacatcgaagaatttgttcagatcaccaccggtcttatcctgcatattcacttcaatatccgtagatgccgagtaacccgggatcataggaggagcgaagaacaatacttgtgcttctttgataatcttctgtgcacgcatatataaggagccgaccacaacgtctgaattctgtatcatggaacgttcgtcccagtctttcagtttgataatgaaagaaccataggaaggtccctgaccaccgataaagctgaatccggaaatcatagtacgtgacaataccgcaggatcggaagcgatcagactgtctacacgtgccaaaatctcttcggaacggtcttgagaagtacccggaggtaatgttactgctcccatcagtgttccggtatcttcattaggtaccatacctgtcggggtggtgttcatgaagaatacaagtatcgcaatggaagcgacaactaatcccatagacaaccatttcttctggataaagaacagtactcgtttcttataacgtttcaggattgattcgtatgtatcgttgaatctgtttttaaacttcttcgtactcattccgatcagtgccagaatactaagcactacgaaaattgcagtaactatcggattgatactgaacaaaccaaagatcatgccaagaatggcaataagcgtgaaagtaagtgtaattcccggatgcaacatctttccgatagcctcggtatatctgttgatcatggttgtatgggctgccgtataggctactttcatacgttctttcaatgtggagtcttccgttgttccgtcttcttttttgtgaggtttcagaagaacggcacacaaagccggactcaaagtcaatgcgttcaatgcggacagaccgatagcgattgccatagtcataccgaactgacgatagaatgttcctgctgtacctcccatgaaacttaccggaacgaatacggccatcatgaccagcgtaatagatacgatagcaccacccaattcattcatggcatcgatagaagccagacgggcagatgtataaccttggtcaagcttggcatgcacaccctcgacgaccacaatcgcatcgtcgaccacaatcgcgatagcaagcacgagcgcacataacgtcaacaagttcaaactgaatcctaccagggacaagatgaagaaagtaccgatcagagctaccggaatggcgatagtcggaatcaatgtggaacgtaaatcctgcaagaagatatacactacgataaacaccaggataaatgcttcgatcaacgtcttcaacacttcatggatagaagcgaaaaggaagtcgttggcattcatggagatgttcagtttcaatccggtaggcaacgtttttgatgcttcatccaacaatgcctcaatatcactgatagtctgtgtcgcgttggttcctgccatctggtatacgatacaagtcacagacttgtgtccgtctacccggttggtaaagttatatcccaagcggtccagctgaatttctgctatatctttcagacggagtacttcaccgtcaggaagagatttgataacgatattttcaaactcttcaggctgttgcaagcgtcctttataacggatggtgtattggaaagtctggttactgcgttcaccgaactgtcctggagcagcttcgacattctgttctgccagagcagcggaaacatcaccgggaacgagcttgtattgtgccatgacgtccggtcgtaaccagatacgcatggaataatcctgacccaaaacgttggcgtcacccacacccggtacacgttgtacttgaggaatcaagttgatcttagcatagttttcaataaacgattcgctatatgtatctgtctcgtcatagagagagaatactaccagcatggaagtctggcgtttttgagtggttacaccgactttagttacttcggctggcaacagaccttgtgccatagaaacacggttttgtacattgacggcggccatgtccgggtttgttccttgtttgaaatatatggatatctcaccggaacccgtgtttgacgcagttgaggtcatatacatcatgttttctacaccgttgatttgttcctccaacggagcaatcacggaattcaatacggtcgatgcactggctcccgtataggtggctcttaccgaaacggtaggaggcgcgatgtccggatactgcgtgataggcagtgtcgccaatccgatagcccccaggatgactatcaggatagaaataacggttgatagtaccggacggttaataaatctatctaatttcataatgattatctgattattagttaaaggctgtggctaaattaccgtcgtgttggtctttcaaatgttgttgatagtttgcttctttttgcgccggtgtgataggctgaaccttctgaccgtctttcaggttttgtactccttcgattacgattttatctcctgaattcaaaccggaagtaaccaagtactcttttccgttatccagattgaagattttgatttctgtatattttaccgtgttgtccggttgcaaaacataaacgaacttcttatcttggatttctactgttgcagactgcggtatagtgattacattctccatggtataaggaatcagaacgtttgcagtacctccgctacgcaatacatgttccttattcgggaagatagcacggatgcttaccgaaccggtagattggtcgataacacctgtgatagcatctactttaccctctatatcgtatgtggaaccatcaattaattgcagtttgatagtcggtattttgctgatttcttctttgatagtgctaccggacttggtcattgccagcaattccttttctgtcattgagaagtatacatatacttcgtcaatctcggaaacagtagtcattggtgtagcgatagaagggcttaccaatgctcctacacgataagggatattgttgataacgccatctgacggacttttaacctgtgtgaatgacaagttctgttgagcagtggtcagttgcgcttttgcttgtgccaattgggctttggtctgtgccagggagttttctgccattgccaggtcatagtcactgatgatttgctttttgttcaattctttcttattgtcatacgtcatctgttgagtactcactgctgcttctgctgtagccactgctgctttggcagtgcgtacagctgcttcgtattgagtcggatcaacaatgaacaacacttgtcctttacgtacagttgctccttcgtctacacagagtttcgtgatgaagcccgatacttgggggcggatttctacatcttgttttcctttaattgtagccggataggcagttgttaaattagcagtcgttttttgtaactcttgtactgcatattcaggaacctttcctgtgtcattgcccttattgccacaactagacaagagggctacgcaaaatgcaaataaaacaattctacttttcatacttataaatatctgttttttaatttaatgcgtttgttgccagtgtgctgttcatccatatagataagggggttaaggaagaaaaaccggaaactaaattccttaatttagtttccggttgcaaaagtactttaaattcggtattcttgttctctgataccgtgttttttaactatgttttttactttattttatgatatacaggagtcataataaaacttaactcataatcctgataaggaagacgatatttttccagtgggatagctccccaactgttgacacaggcaagtccggtttgtgccttgtcgatacagaagttggtgaagtctgccttttctacttccggtgagtgacgctggtctttgctgtcgccgtcatccaatgactcgatggtgtaattcagggcagaagcggagaaaggagcactcgatacgaattgcagtccgttgccactgatgttcagaagtctccaccagcggatatccgtttttgttccggtttcctgcgggcggatgtagggatagaattgttcttccactgtctggcgatattttcctaacattgccgcgtggttgcggtcggcatagttttctcccggaccacggccgtaatattctatctcgttgaagttgaccggcatacgcatttgcataccgaaacggaacatgtcagaaactttcttgctcttgtctgccgccatcttttgggtaactttcactgctcccttgttgttaatggtgtaagtcagcgataatgttccgccaatcgacttcatatcatattcggcacgaactactgcctgatcgttttcaatagcatgtttcagagaagtcagttttagttcaggattcttccaggcggcatatttgcgttgcagtccggctccgaagtcattgtcggtcggtgcgcgccagaagttaggagtcagtgcgctgccatcttccatcagttgcatgccgttgacgtcgtaacggcagaggtaaccattgtgtttgttgaaatccatagagaagttttcacctttcacaatcaggaagttgcggtcgttgtccaaaatagtgggcacgatgaccggaaggttagatgcctgttggttttccagctttagttccggtgctttgtagtcacggatgcttagttggtcgtaagcgatggtagctcctgccggcagcagtgtttcggcggctttcagtttgtagctcacgttgagcagcagttctttgcaaggacagatgttctttgtgtcaaatggaatttgcactttcacagtttgttggggcgctactttcaggtcggatacgatgcctgtttgcactacttctccgtttgccagtaattgccattccatgtaataagcagataagtcgcggaagaaatactcgttgaagatgttgatttcgcctttggcaagatcagcaggagtcgtccatatatcctgatagaaataagctacttcgtatgcatgcggattgggtacgcggtcggggctaatcaaaccgttgtcgttgaagttattatccgaagcgtcgtatttgttgaagtcgccgccatagccgtagatgcttactccgtctttgtttttccagtggcaggactggtctacgaagtcccagataaatccgccctgatatttcggatatttgcggatgatgtcccagtattctttgaatccgccttcggagttacccatagcgtgtgcgtattcacattggattaacggcttttggatattgccttcgctatatttgatacaagcgttgtagtcatagtacattgggcaaaaaatatcggtgaattcgctggttcctgcttgttcgtactgtacggcacgtgtcttgtcttcattcttgatccaggtgtagcatttttcaaagttcggtcccatgccggcttcgttacccagtgaccagaagatgatggacggatggttgtatccgcgttgtacgttgcgttggttgcgttccatgtgagctttggcgtaacttgggttctttgccagtgtctggtcgccgtaacccattccgtgagattctacgtttgcctcggctactacatacagaccgtattggtcgcacaggtcataccaacggttgtcgtctgggtaatggcaggtacgcacggcgttgatattgagttctttcatcactttgatatcttgcagcatacgttcggtagaaaccacataaccgccgtccgggtccatttcgtgacggtcggctcctttgaagagtaccggttgtccgtttacgagtatctgtccgcctttcaattcaatcttgcggaaacctactttaacagggattacttctactacgttgttgccgtttttcagtgtagcggtcagtgtgtagagattaggcgtttcagcagtccatttcgccggattggagacggatagggttgtgtttaatttgcccgaacctttcaggtcggcagtcgctacgctgttgccttgagcatctgtcaagtttaaagctactgtgccgcttcctttcaggtcaacggctatattcaatgtaccgtctttatattggctgtccaaatcgggagtgatgcgaatatcctggatgtatttcttgtcgcgtgcgtaaagataacagtcgcgtcctacgccggagtagcggaagaagtcctgatcttccaggtaactaccgtcgcaccagcggaaaacttgaaaggcgatgacgttcttacctggtttcaggtagttagtcaggttgaattcagcttccagtttgctgtcttcactatatcctacgtagcgtccgttcacccaaaggtacatattggacgttaccgagccgaaatgtgcgaaaatttctttgcctttccagtcggcaggaaggatgatttctttgcggtaagagcctacgtggttgttttctgtcggcactagcggagggttgtttttgaattgacttctccaggcatatcctacgttgacatagatagggtcaccgtagccgttcaactcccaaacgccgggaacttgaaggtcatcccaacctttgtcgttgaaattagtctgataaaagtcggtcgggcgtgcgtctgcgtgtcttacccagttgaatttccaaagaccgttcaaggtcatgaaatttgtggaattttctttaatgccggctttagcttcatcagccgatgcgaaagcaaagtaattagtgtgcatagcggaacggtttacggaattcacttccggatctttccactcgttgaagctttgcgcttgaattgctgtcagtcccaatgcagccaagcagcaagagagtagttgtttcttcatgggttttttgtattaggtttgaatttctggagtcaaagatagggaataatttgattaataaaggagaataataagtctaataggtatgtcaatagttcaattttaatttatttatgaactattcaatggagtctggtaatggtatgtgaagttggcatagatttatgatgaaagaagaacttggtaaattaactttttgagtatcacctctcgagtatggtaaagtcaggaagaaacgatgaataggctgtatttttctaacgtgacatcctgatactatgagtaatacagctaattttaatgctttttatttcttgttttgtactattttgtccctttttagtatgataattgtatcttaaaaactgttatattcacttattttgcggcgagtgtttttaacaaacctatttcaaattcttaaatttattattatgaacaaactaacgagactaaaaagatgcaagaggtgcattagtacgttaatgcttatgtgttgttcgctcttggcatgggcgcaaaatacagtaacgggaactgtattggatgaatccaacttagaggtgattggtgccaatgtaaaggaaaaaggcacggctaacggtgctattactgacatgaatggtgttttccatttaaaagtaagcaatcttcaaaaagcagttctgcaaatttcgttcatgggatatgaacctcaagaagtgccattaaatggacgcaaacaactgaaaattattttaaaagaaacggccaatgaacttcaggaagttacagttgtggcctatggtacacaaaagaaagaaactctgacaggagctatttctgctgtaaacaatgaggcgttgatacgttcgccgaatgcaagtgtggccaattcgctggcgggccagattacaggactttcatccgttcagactagcggtcagccggggcaggaggaccctaaggtatttattcgcggagtgggttccttaacagaaagtgcttcctctcctttgattttggtggatggtatagaacgttcgttttatcaaatggacccgaatgaaatagagagcgtgacggttctgaaagacgcttctgctactgccgtgttcggtgtgcgtggtgcaaatggtgtaattttggtgactacacgtcgtggtaaagaaggtaaagcgaaaatctcagtgaattcttcagttggtatccagatgcctacccgaatgcttaaaatggcagatagctatacgtatgctactttgagaaatgagattataacaaatgataagccaaatgctaccgagaacgatttggtgtttaataattatgcagttgaacggttcagattgaatgatgaacctattatgtaccccagtatcgactggagaaagtacctgcttaataaaacatctgtgcaaacgcagcataaccttaatatttccggaggaacaaaggatatacgttacttcatatctttaggtttcttatatcagaatggcttgctgaaacagtttgaaggagtggggtatgataataattataaatacaaaagatataattatcgcgcgaatttagactttaatgtaactaagactaccacgctgaagatcggtatcggcgggattgtaggtaaccgaaatgagccgatgattaatgatgcgactaattcgatttggacactgattaatcagacaactccgttcagtagtccgggtgtgattgacggacaactcatagttacccccgaagaacgttttgataataaaatcaatctgggcaatagtgctttgcctaagtgttatgggacaggttactcaacagctattaataatacgatgaatctggaccttctgttgaatcagaagttggacttcataaccaaagggttgtcggcggaaataaaaggtgcttataatacgagttatggctttaccaaaaaacgtaaagggcaagtggaacaatttatgcctttctatcaatcttctttggaagatccgtcacttggttatgattcgccggatttcaacaagaatattgtttataagatcaaaggagaaaataagaacttgcaatatgaggaaacttcttcgcgggcacgagactggtatctggaagcaagcttgagatataaccgtaagtttggttttcataatgtcgggggattgttcttgtacaatcagagtaagaaatactatcccgctcagtgggtgggagtaccgtctgcttacatcggttttgtaggccgtctgacgtatgattacaaatctcgttatatggcagaagttaacttcggttataatggttctgagaattttgctccgggtaagagattcggtgcgtttcctgccggttccatcggttatatcctgtcggaagaggccttcatgaaaaaacagaaggtggttgattatctgaaattccgtgcttctgtcggcttggtcggaaatgacaatcttggaaataaccgctttttgttcttgccggattcttatgatgtgaatctgagcggagtagacgggtggaataacaataagtatggattcaactttggttataacagtaaggcgttaattttgggtgcattggagaagcgtttgggcaatccgaatgtgacttgggaaactgcgctgaaacagaactatggattggacgttcatttcttgaagagccgtctgaaaatctctttggactatttcctcgaagaacgtaaggatattctcatcaatcgtaagacagtacctttattaacgggattgacttcatctattctacctgctgtaaatatgggtaaagtgaaaaaccgtggatatgaggtagaagtgaggtggaatgacaagatcgggcaggttcagtataatgttcaggcaaacgtttcctattcaaagaataagattattttccaagacgaagttgagcctaatgaaccttatatgtggcggacaggaaatccggtcggaacactcttcgggtatgtggcggacggtttctatacagaagcggacttcggagagaacggcaaactggtggcaggtctgcccgatccgggtgtgtctgtgaagccgggtgatgtgaaataccgggatttgaacggtgatgaggaaattacttccgacgaccagactattattggaaacccgactcgtccggcttatacattcggattgaattatggtatcaattacaaaggctttttcctgacgatgaactggactggtgctgcacaacgctctttgttgctggacggagctttcagagaaccttttggtaatggtaaaatccgtggtttgatgcagttccatgcagatacgcgctggacaccggaaacagctaatacagctactacaccgcggtttacagagacaaatgcagtctataatatgcgttcctcctctttgtgggtgcgagacggttcttatttgaagctgaagaatgtgacaataggatataacttcacagataagaagatgttgaagaaactgggtatccagcagttaggcataaaactgacaggctataatctgctgacttttgataagtttgacatcatggaccctgaatgtaatccgaataatgcggattcttaccctatcattaaaatatataatttaggtattaatctaaccttttaatagtgctgacaatgaaaaactataaaaaatatataggttgtctttctctctctgtattgacactgatagggtgcgaagaccttaaatttggagagaaatttctggataagccgataagtaacgaacagaatatcgattctgtttttaacaaaaaggtatatgctgagcaggcactggcggaaacttatcattccctgccggattatctgccgatgcaaggacgtctgggatatggcgttctggaaatgctaaccgatctgggtgactggacgaaaaagggagcgcctaaattctatacaggaacagtggacggaacaaatacatatctggaacatcttccatatcggttggatgtcgccaatactacgataggagtagggccggtttatggtattcgaagagcctacatttacattgagaatgtggatagagtgccggatatgactgcggatgagaaagcgatagggaaagcggaagcgcaagtaatcattgcctatcattattctcaaatgctccgttattatggtggtatgccgtggatagaccatgcatatacggcagaagatgcgatgaaatttccccgtatgacagtagaagaaaccgtacagaagattgttggattactggatgcggcggcctctgtactgccttggcaggtgaatgcagataatgacggacgaatgacggctgcttctgctttagcgttaaagtccagagtgcttcagtttgtggcgagtcctttatttaatgctgaaaagccctatctggaaggagatgcttcgtctcagttccttacttggtatggcaactattcaccggacaggtggcagaaggcgttggatgccgggttagaatttatgcgggctaataaaaagaactcagatgcttatcaactggtgaatacaggtaatccccgcgatgattttgcagcaggatatttcaatcgccataacggtgaagtcttgatttcttccagaagattcaccacttatgctacgggaaagcttccgtttgcccaggtacgttatggagttgcttctcctacattgacttatgtcgatatgtttcagatgaaagacggaacagaattcgactggaacaatccggaccataaaaaattccctttctttgataaggacggaaaccccagaagagacatccgcttatatgaaacggttgctgtgaatggagataagtttaggggcgcccagaaagtgcaaatttacgaaggagccacccaggcgccttataaagacggacgaatgagttacaatggggttgccatgagaaaattcatacggaacttcaatgacgaagtgaatggtaaattttattcttgtccgttgatccgccttccggaggtctatttgaatatggccgaagcgatgaacgaattgaataaggcggaagtccgtgatgagtttggtaatacggcttatgattatctgaataaaaccagactgcgtgcgggtatgcctgcgatttcggcaacagatgttccggccggcaaaccgttgcgtgaagcaatattacgcgaaagagccattgaattcggctatgaagaagtacgttatttcgatctggtacgttggaaacgctcagatatatttaccggacaattgtcacgtctgattattaaaaaagcggccggtgagccaagcggcttttcttataccgtatctcatgcaatggcggaaacgcgtcagtatgcaaaacctgaaaagtggaacgacaagtatttcctgttgcctctgcctatagatgagataaacaagaaatatggattgattcagaatccgggttggtaataatcaaatcgttgaacaataagaagaatgattatgaataaatcactttatatcgtagctttctcgttggcgtttgccactacgggtatagcgcaaaataatgaaggacaagataaggtaatcgatctgggcacacagacgactaccgaattacggaagacacaggctgtctctaccatttattcgaatgaattagataaaaatgctgccactagtccttacaatgccatttatggcttgttgccgggattgagtgtgatgcagaacactagttggggcacagataaatctcgtctcaatgtgcggggacgcggttctttgaatggagatacacctttatttgtagtagatggttttgcacgccctctcgaatatatcaacctttcggaaatagaatcaatatccgttttgaaagacggtgctgctactgctctttggggaggcagaggcgccaacggagtggtattgataactaccaaacgcggtatatatagccagaaggatataaaagtagactataagtttggtttaggcttccctgttaatcagccggaatttgccgatgcttatacctatgccaaagcccgtaatgaagcattgagatatgatggtttgcaaccggacatggatgaagcttctttcctgtccggaggcaatagcgatctttatccgaatgtggactggcagaaagaagcgttacgcaatcatacaaccagtcatcaactggacatcactttccgcggaggtggcaagcggcttcgttatttcagtgtcctcaattacaaaaacgatatgggactgttgaatagcaagtacactgattatacagatcgctataactcccagatgaagaaatacttcctcaatcttcgcatgaatctggatgtggatattacggacgcgacaaaattgaaattgagtatgctcggtatgctgcgagagaccaagcgtcccaccacatcggaagctactttgtttgaacagattttcaacaccccgtccgctgcatttcccgtgcagacacagaatggattctggggcagtaacaatgtgctgaaaacaaacccgatagccaatctggcggacgtaggttattataaactgaatcagcgtatgttgcaggcggatttgcggttggtgcaggatttgtctgtattgactcgcgggttgagtgcggaactcgctattgcttatgataataatgcaacctatcaggaaacagccaagaaaagttttatgtaccagaccattgaaaaaggcacagacggagaaccgatttacacgaattacggaaatcctaacgatgaactggaaatcagcaacaaaggattggccaatcaatacatacatgccaattttgaagcgaaggtcaattatcaccggacatgggataaacatgattttacggccagtgctatgtttcgtcaagaatcaatgacgttgacaggggctaataacagtcgttaccgtcaatacatcatcggaaccgcaggttataattttgacaaccgttatatggtggatatcgtagccaactgttttggcagcagcgtattggggaagaatgacaagtatcgtgcatatcccgccatttctgccgcctggatactttcgaacgagaatttcatgaaagaaatttctgcttttgattatctgaaacttcgtgcttcttacggacgctccggatatgatatttatgattatgacatggataagcaatattgggtaggaagcggtgcttactattttcaggccggaaatacttctgccggaagtagcctgaaggaaggagtgttggcaatggaacaactggatctggaagttgcggataaatataatatcggtttggatatgagcctgttcaagggactgactttttctattgacggtttttatgacaagcgcactaatatcctgattgacggaagtgggctgatctcatcggcaatcggggttactattccgcagatgaatgcaggaaaagtggaaacaaaaggaacggaactctctgccatgtggaaaaaggaatacaaggacttcaactattatatcggagccaacttctcctatgccaaaagtaaagtcgtagaaaatggtgagggatatcagccgtatggctatttgtctaaaaaaggttaccctgtcgggcagtgttttggctgggaggctatcggttatttcagagatgaggcggacataaagagcagtcctgtgcagaaattctcggaagtacgtccgggtgatgtcaagtacagagatctgaatggcgataacgtgattgacaacaatgaccagaaggcgataggatattccactgccataccggagatttattatggcattaatttgggatttgaatataaaggtttcggcgtggatgctctgtttcaaggagtagcccattatagtgtgatgttgaacactgccagcgtatactggccgttgagaaacaacacgaatatttccagctggtatctgaacgacagaatccgctggacggaagaaacgaaagatatcgcaaatgtcccccgcctgactacgctggataatgccaataacttcagaaacagtacacagtggttggagaacggtagctatttcaaacttcgtaacctgaatgtctactataaccttccttcctcttgggcgaagaaagtgaaaatggaaaagattcaggtatatgcgagagctaacaatcttttttcgctcgatcatgtgaagtatatgaacagtgaagatctgaaaatcaattatccggatatgacttccgtttatttcgggttgaatattaacttctaaaatgtgaaatgaccatgagaaaatatatccttttatatacaggtttgctattatccgtatcggggtgtagcttgctcgaattggacgaatcgacaggcttggacagggaagaggcctattcctactttagcaatgtgaaaggtttggctacctacgtttatagccagttgcccggagatctcggagtgctcgacggggctttgagggagtctgcaacggataattctgtttatgtctggagtgataatagtgttcacgacttttataacaatgcctggagtcccaacaatgcagtcgataatatgtggtcgaagtgctatggagctatccgttccgtcaattcatttcttgaaaactattcacaggaaaaactggagcgtttccgctggaacgacacgtatgaagaagacattgccaaagctaccatgtatcgtgaagaattacgggtgttgcgagctttttatctgttcgaactggctaaacgatacggtgatattccacttttgacacgtacgtatgctttggatgaaatcaacggcgtggaaaagacttctttcaatgaagtgataaaatatatctgtgacgaatgtagtgacgcggccaaaactctgcctgtcagtcatcaggacttttgggcggagacgggacgtgtgaccaaaggtacagcgttggcattgaaatcccgtgctcttctttatgcggcgagtttgttgcataatcccgcacaggatgccgataaatggaaagcggctgccgatgcggcttatgctatcataaaagagaactggtacagtttgccgaagacgaatgtagatcctctgtatgacaagaatggtggaaacgatgtattgaaatctccgcaattaatttttgaacgtagaaatggggaaagctttgattttgaagctaacaatttgcccatcagttatgaaaaggggaaaacaggcaacgtgcccacccagaacctggtggatgccttccagatgactaatggaaaagactttgactgggaacagattacaccggggcagaatccgtatgaaggcagagacccgagattctataaaacggtgctttgcaatggcgatacatggatgaactcgatcatccagtcttatgaaggaggaaaagacggtgccggaacaaccggagcgactaccacaggttattatttgaagaagtatatgaatgagactgtttctctagctccttccaatgagaaaaagaaaccgcaccatttcatcatattccgttatgcggaaattctcctgaactatgcggaagcaatggatgcctggaaagacgctgattatacggataatgaccatccgttgtctgcacgtgcggcactgaatcaggtgcgtgctgctgctgatatgcctgccattacaacaagcggcaatgcgtttactgaaagcgtccgtcgtgaaagacgagtggaacttgcgttcgaagaccataggttctgggatatccgccgttggaaaatcggtgataaaaccaaagctatttattgcatcaagatcactatggaaaacggcttgcctgtttataagaaagaattgcttgaaacacgtaactgggatgataagatgtacttatatcctataccacagactgaatattataagaatcctaatttaggtcaaaatacaggctggtaactatgactaagcgaaccctaaaagtttttgtctaacttttagggttcatttttatgggaagaagttcttttctatgtgtggtcccttgttccagttttatgctgcaggatccggggcctcaccgctaccgccttcgtccggattttccggtttatttccccctccatttccggaagaggtgccgccgtttccttccgtcttgtaaatacttacattatccagcatatccttaaatttatatcccggcgtaaatacaattttcacccgacgaacggtatcggcatctacatctttttcttcattctgacttttacagttcatgcccggacggaaacatccgaaatcgcctaattgtacagacaatcctttgttgagattggtgttcaatgtatcaatcagtgcgtcaatcacgtgtttcactgcgccttcgggaatcataccgaacatggatacttccttgcataaatctctgaaatttaccgtattggtaattacattctgtgctacatacttttcagtctttgttttgtcaaagccgaaaactcttttcttgacaacatactttaatgccatagtctttcttcttttaatagttagttaatctgttttattgttgttttgtgatcacgatgcaaagatatggtttccgaaattcatgaccaagctgaaaaagaattgtgcgttaataaattagttaataagtagaatgctgctgtattgggaaattctatgtaaaaaagatttcgcagaaagatagaaaaagaggatgccgatcaagatattggggtatcaagtgtggggaaggcatcctcttcgaagatagaacgaaaggactacttgcacaagcaatctttttcgctttgttgtctatcttctatatatactggtaaggagtatgattctgaattattccgtatcttctttggttcgcaggctgactaactctgtccacttgcttatacttaagtcgaaccctcctttctccagatgttggagggcggttctaaaatgtcgtattactttttctgtatcattggttgtttgatactcaagctctccaagtgcatattcaagacgtgccatttggatgtaatctaacaaggtatagttttcgtcaacggataaagttgaaagatagttcaacaagtcgaatgctttttctcgttcttcatctgataagttggagatggggcggcgcgcgatagggtgctgcattaatagaataatgttttctttcaagtcatcgtacatatctttgttatgtttgtcgcatcatttccctgtggtgcgcggtttaaaaaagagagcgtgggaaactaccaactgtacgccaaccataggctcggcaaagaccctccgcgacataagtgatagtcccacgcccattgggtatataaacaaattatatatacagaagtgtgcgcgagacctgacatcacttattgccattcgcggtaaatttttgccgaatttatggttgaatgcaataaataatcgttctctataaaaaaataaaatgttcctctctacgtatgaaaggaaaccgctacaaaagtagcaataaatattgataaagcaagtaatcttgttttataatttcatagatagttctgatttactaaaagtcagtataaatatgattaatataaaaagaaccctacactgaattattgttttttttgttcagttcagaattggaattctaggtaattctgctagatgattttaacttaactttctgttttctttgcataaaccacctgtttgcctgttccataacggattaagagtccacgttcgataaaagcattcagttctttcaaagcacgttttttgtcgtgtcctgtcaatcggctatagtcggtgcgggtcaggcagggatatttgttcagatgctggttgattattgtcaaacattcttcttcgctgtgcccttttctgtggtgacgagtcatcgattctccacgttccagtctcatttgctggcctacttctttcttaaactggctacttacccggaaattgacatttttcagttctatggattgtgcgtgtacatcttttttcttcattacacgaggtcccttcaaagacactgaaaaatatccgatatctcccagttccacaatccatccgttggcaatcaggtctctcaactcgttttggaaagactgcatggcgcccgccagtaaactgcggcttattcctgtgaatttgtgtacacggtctagaaattcttcctgatcgacggttcctttgaatactacgcggggatgaagcggttgtgcgtcgcctgtttgttgaatgtcaggtgtgtcgtaaaggtcatattgtatactcatattcgtttttatttagtgtaggcacattgataaatccgtttgcctatccggatttacttcacttgctacttttatttcgttccactatagtttctctttcgtcccactatagtgctccgcaagggaaactatagtgttctttgcggaacactatagtggaacgaaaaaagattaggcaacaaaggtaatctctttaggcaataaaactaattatattagcaggaaagaaataaaaacgtcgcaaatattgtttattaccttaagtcaccctttccttttttaataaattagctagaaagtgtggtgtttattgaataagaacccttatttttgcagcatgttacaatttgagaatcaaaagataaagcaaatagttcgcaaggtgcttccggtagtaacgctgggagctatgttatattcctgcgccagtattggacggccggacggaggcccttatgatgagacgccgccccgtttcatcggtagtactcctgctgcgggcgctctgaataatgaaaggactaaaatttctttgatgtttgatgagtttattaagctggagaaagcaaccgaaaaagtcgttgtttctcctccccagatacagcaaccggaaatcaaggcttccggcaagagaatacaagtcaacctactcgactctttgaagcctaacacgacctatacgattgacttctcggatgcaattgtcgacaataatgaaggtaacccgctagggaattttgcatttacgttttctaccggtacggaaatcgatacgatggaagtagcaggaacaatgctcgacgcctctaacctggaacctattaaaggtatgcttgtcggactacattccaacctgaatgattcggctttcaacaaattgcctttcgaccgtgtggcacgtacagacagccgtggacgtttctccatccgtggtgtagctcccggcaaatatcgcatctatggattgatggatgccgaccaaaactttacttttaatcagaagagcgagatgatcgctttccatgattcgttgattatcccccgcatggaagaacgtatccgcatggatactgcttgggtggactcattgacctacgacacgattgttgagaagaaatatatgcattatttgccggatgatgtcatcctccgtgcctttaaagagcttaattattcgcaatatcttatcaagtcggaaagactggttcctcataagttcactttttattttgccggtaaggcggacactttgccagtcttgaaaggcttaaacttcgatgaaaaggatgcttttgtcatcgaaaagaatcagcggaacgatacaatccattattgggtgaaagattctttgctcttcaaacaggatactcttgccatgagtctgacttatctttatacagatactttaaaccaattagtaccccgtacagatacgctgaatcttgtttcgaagcagaaatataagaaagaggagtcggataaggacaaaaagaaaaagaagaaaaagaaaggggaagaggatgaacccgaaccgacgaaattcttgccggtgaatgttagtgccccttcgtcaatggatgtatatggatatatttctttgaattttgaagaaccgatagccagctacgacactgccgccatacatctgcggcaaaaggtggatacgctctggaaggatataccgtttgaatttgagcaggattccgtaaatctgaagaagtttaatgtgtattatgattgggaaccgacgctggaatatgaattttcggtggattcgaccgcatttcatggtatatacggattgtttacagacaaaataaaacaagggttcaaggtgcgtagtttggaagaatatgccaaaatcacgtttgtggtgacgggagcggaacctaatgctttcgttgaactgttggatgcgcaggataaagtggtacgccgaagaagagtagaggaaggaggttatgccgacttttattacttaaatcccggtaagtactccgcccggttgattaacgaccggaatggaaacggtgaatgggataccggcaattttgaaaaaggggtgcagcccgaagaggtgtattattataatcagattttagagccgaaagccaactgggatctagaacaaagttgggatattcatgcagttccgctggataagcaaaagctggatgaacttaaaaaacaaaaaccagatgaagacaagaagaaaaaggatcgggaacgaaatagtcagaaccgccgtcgttagcgttcgacgcaattttattatcggattagtggccttactgatgggagctttcgccctcccagccagtgctcaatgtgaagcgaagaatgatgcgtttcaatccggcgaacacgtaatgtatgatttatattttaactggaagtttgtctgggtgaaagccggacttgccagtctgacgacgaatgctactacttatcattcacaacctgcctaccggatcaatctgcttgctttgggcagtaaacgggcagacttctttttcaagatgcgcgatacgctgacttgtgtgatcggtgaaaaactggaaccgcgctatttccgcaaaggtgctgaagagggaaaacgttacacggttgatgaggcttggttttcttataaggacggtctttgcctcgtaaaccagaaacgtacttatcgggatggagcgtttgatgaatctgaagctagcgatagccgttgtatatacgatatgttaagcatcttggcgcaggcacgttcttacgaccctgcagattataaggtgggagacaaaatcaagttcccgatggctacgggccgtaaagtggaagagcaaacgcttatctaccgtggaaaagaaaatgtgaaagcggagaatggagttacttaccgttgcctgatcttctcattggtagaatatgataagaaaggaaaagaaaaggaggtgattactttcttcgtgacggacgacttgaaccatcttcctgtccgtctggatttattcctgaacttcggttcggcaaaagcattcctgaataatgtgacgggtaaccggcatccgctgacttctatcgttaaatagatatagagaaaaaacgaaggcatatcagaagtaaatggccctgccaacctgttattttttagacgcggataacgcggatgacacggatttattatctttttatccgtatcatccgcgttatctgtttctaaaaggtatacttttaaaagtgttgatgcgctttcctgttttattcctgaacttcgaaaggcactttctgatcctttcggaatacgctagattcaaaagttgcaatcaactctccgtcttggtttgttatatctacctgatagcaacctgtacttcgaccgatatagcgttcgcgtgcttcggcaaagagagtatctccggggccgctggcacgcagaaaagtaatagtggacgagagagagaaagctagtgtgccgtgcgagttggcagctgcggcaagcgcaaggtctgccagcgtaaagatcgctcctccttgtgtgcgggcacctgcgttaagatgttcgggttttatttctaatttggctttactgtaacctttgcgtacttccagcagtactactcctgcattttcggcaaacagatcgttcttaaaaaactcttgtgcggtcatgatattatttttgaagattctttaatcgtttcttattttttcaatgaatggatatataccttatctttttcaattgagtagctaaatttatttgtttcagacataatatccaatattttctctaaattatttgtttctataataaaacttccatggaaaatcaaattcttgagttgctctgactcaaatgcgaatgtcacatcaaactggcgctccaactctttagaaatgatcgacataggaacttcatcccagaatactttgcagttgatccactgttcagcatagtcagcactctcggtcagcttataagtttggtcaagcttattaactgtcatcgtttgattaggcttcattataaactcttggttgatgcacaataagacaatggaaccttctaggagtgatacctttatataattctcatcaccataatttttaacgttaaacttagtacccagtaccttgatctgtgcggagtctgtttgtataacaaatggatgctctccatgctctacctcaaaatacccttcgccttccagccggacattgcgattctttcgactaaaactctcggagtaagaaagcttggaatctgcgtttaaccacactatagaaccgtcaggaagcttcatttttaatttcgattttcttggagcgtatacttcggaaatcaaagaatcatcaggtgttgtaaaattataaattataaaaggagtggtaaacagtaatataatgattgccgctgcgtaacctgcatacttcacaaataaggctcttctcatctttcctgccggagcactcttatgtttgcggattcgtttcgcaaatctgttataggcttgttcttcgtgtacagatacatttttatactcggcagacagaagccagattcgtttctgctgttcaaaatatttctgattctccggatcggagtatatccattcgttcaacttatgcaagtcctctttggtgatacttcccgagaggaaatcatatatcagtctgtcaaattcttctttcataccatcttaaacttaatatctattgaaaatcatatacctgcgctatcatcaggacagtttgtcaatagaagaagtatagtgaattactttgctttttaatattaattaaatatattcgtaataaacattacaatcagggcaagataagatcttgctgcttccttcagtttatccagtgcacttcgcatgtgatatttcactgtatgaatagtgattcccatgatttcggcaatttcttcttgtcttttgttctcaaaacgactcaataaaaataccttccgggtttccggagataagccgtcaatcgtcttctggataatagaatgtagctctttaccctctaaatgctcaaccggattttcgcccaaggaccataaatcgctgtaaatgaccaggtcttctgacgagcaggccgtttcccttctcacatattcaagctgaagataattgatacacttattggctacacttctgaaaaggtagttcttcaatgaggtgttaattgttattttagagcggttttcccatagactatacaccaaatcttctactatagattctgatagataagagtctgtcaaataccctctcgctatccggcaaagatctgtatagtaagttttatagatgtatcggaatgcctcctctttacccgatttcagggcctcgataatctctgtttccaggtttttttccattatgtctttcagaaatcgtatatttgatttattagttaatatattaaggtgaatactcacaggttctgtttctccgatggataattcgggggcaaggtattgaaaaaatgtaagatgaccaaactcactaataaaaagatgagttgaagggctgaacgaataaaaaaatcatttctcactatactttttattaatctggctgtcatattaatgaataggccaataaagcatattttaacctgaatctctatgaatggtaaaaagaaggattgtaaaagagcatagcgcgacactcttttttaagttataaggtatacaaacagctgttttagtttagtcatgcaggataaagattgttttcaggaataacagaaaataagctatttcttatttaaataatattgtatgaagaaactacattttctattaagcacattccttgtgtttatattcacgtcatgcggagaagatgaactgaaaggtgttgtcttatccgaagatccggggtacgtaaaagaaccattggtagccatacaggcagaagatggcacagggaactggataaatggtcttattgaccagaacagtagggtcatagccttagattttcgcattttggacgaccaaagtgcggtgaatgtgaaactcaaactggcggatgaatgggcaaagcccattgatccgcttactactgatgctgtactggacttgagcagcggtatcacccgtattaaagtgaatgatggagcagatgatatcgaatataccattttcagcacttctactcagctacttcgaggcgtaacggctacttgtaacacagagcaggttagtgctaactttattaatggcatcgcttcgttacgtttcaaacaaaacactgcatttgcaaacgttgtgttgatgccgactttggcagataacgcagaaatcatctctacggatcccgtcagtcaaaaggatgaaaacggaaacctgattgttgacctaagtagcacacttactattactgtaaaagacaatacgaacaacatgactaaaaaatatcagttgagtgctgtaaatggaattattgacgcaggggtaaactggaaaaatattactgctgatctaaaaagccaacacagtagtatttgtattcctgatttcatgattgtctatgaaaataaaaacttgcatggaaggagcggtaatacgggatggttgataactattcctgccggtagaataaatatgaaggttagctgggatatgaataaagacaatgtaacatgggctgaacccactgctcaacatcgtacaacagctatcatgaatgataatatggattattcattgtttgttccgggattgtccgggcaattctgggtaccgatattttatagcctcgggtggaatgatagtgggctgctatccgcaccgcgtctcggatataacctatctacttctttgaagtattgtccgggaactctgggaattacagctgatggaaaagcggagatttcgtatgcagaagtgatagataataacttgtataagtttaccagcggcggagccggcaaacaagctgccaatggagtacagtggtccccaaccagtgctgtcagtggatattcctatccgttgcaaaaagggcagatcatgattgccggagaaaatgcagaactttacaagacatttgctactaatgaaggaagaaatacttcgacccgtaacagaggaatggatggagcattgtcaggaagtaattcatgggctgctaatccggtaagcatttggacttttgatggcaagcctgtaggacgccgggctgtcggtatcacggaagaaggagacttggtcatttttgtaagtaatcgttttacgaattcttataactcggtaaaagcagcttggaatgtctttagtgatggctcttctttacgggaagttgctgtggcattgcaggaagtgggttgtacggatgccattgtgtttggtgagaactatcatagtcctgttgttattcgggatgatagtagaggggtgcctttaggaaaggtagccggtagatacgactgggaaacgaacggcaatgttaaaaatgcggataatgaggctagttcgcaatcctggataatgtttaaataagaatattgtaaaacaatgagttagtaacaaaagatatacacataaaaacttaaatcaatgagtaaaatcatcaaatgcatgttcttcgtgctattagctgcagttcttccactgtcggttcatgcacaacaggtgaccttacatttgcaggacgtaacggtgcgcaaagcgttccgggagttggaggtcaaaggaaatgtatccttagtatatgagaaaaatgatgtggacctgacccgtaaggtaactgtaaaggtagataatcaaccgataagcaaggcactggatcagattctgaaagggcaggagttgatttataaaataaaagataatcatattattatcacccggcctgtcgttcggaaatcggataagaaacggcgtatcaatggtgtcatcagcgatgtcaatgatgaattgttaattggagtatcggtatcaattcccggtactaatattggcacggtgagtaatatggaagggaaatttgaactggaaataccggaggacgctaagaaattgcaagtgtcttatatcggttttgacacgcaggaaatttcattgtcgcctggcaagacgacattcaacattgtaatgggagagaatgtgaaaatgctttcagaagtagtagtggttggttatggcacacaaaagaaggtgaacctgaccggttcggttgctacggtaaatttggaaaaggaatcactttcccgtcctttggtcagtgcttcgcaggcgttgagcggtatgacagccggtttgcaggtgatgcaaagctccgggactccatataatgaaggcttttctttcaatattcggggagtaggtaccctgaacagttcttcaccactcgtgttggtggatgggatggaacaaagtctgaataatgtagatcccaacgatattgcttctatttccatcctgaaagatgcggcctcgtgtgctatttatggtaaccgaggggcaaatggggttattctggttactaccaaaaccggacaaacaggaaaggtcagcgtatcttacaatgctactttttcactgaatcaacctaccaaactgataaaaacggtatctaactacgccaagtatatggaattgatgaacgaagctgctactaatataggagaatctgctcctttcagcgacattaccatcaatcaatggcgtgaagctgaaaaagatccgaatggcatttctgcctccggctatcctaattatgtagcttatcccaatacggattggtacgatgagatatatagtaatgactggatgatgaaacattcgctttccgtcactgggcaggagggacgtaccggatataatctttctatatcttatactgacaatccgggattaatcaaggataccggataccaacgctattttttgcgtgccaatgtttattcggatattactaagtggttacgtattggtactcgcgtatgggggtatcacactgaccagaagaaaagcgataccggttcactcaccaatatcaatacccaaaaaatgataccgggcgtatatccatattatgacggaaaatatggtgcgccggaagcgaacgaggaagatccgcaatctcacaatcctctgtgggacatggcacaatcggaagggcatatcaaaaacacgcagttctttactactttctatgccaacgtgaagtttctgaaacacttctcatacgatgttaatctgaactataaagattaccgttatgaatcgatgtccgtaaatacggattatgggaaatatagttttagtacagatcagtggatagctgcccccaaagatcctgccgatttgtatacccgtatggcgtatgtccgtgaaaaccattggaaattaacgcacttgctcaactataaccagactttttataagcatgatattggtatgttattgggctttgaagaagaacgttttgtcaaacggactaccgacactgccaaacttggattaatagattcgtctgtgggtgattcaagttctgctactactccttcttccataggtggtacaggtgaggaatttacatcccgttcttacttcggtcgtattaactatgctttcgacagccgttatttattcgaggttaatatgcgttatgacggttcctcccgttttgctccggataatcgctgggggctttttccatctttctctgccgggtggagaatctgtgaagagagatttatgaaaggacttcctatcgacaatctgaaattacgtgcttcgtggggtaagttagggaacaatgcgattggtaactatgaatggcaggctgtgtacaactcggcaaagtacgcgtttggaggtagccttaataatggtttggcaattacttctatttctaataacctgttggaatgggaaagtactgctattacgaatattggtatcgactttgcaactttaagaaaccgtctgacattcgaggctgaattttataataaagtaacggatggaatcttatatcgccctgatatgtatatgtctctcgggacagccagtggccctcgtcagaacattgcggaagtgactaaccgcggtattgaaatgaccctgaattggcaagaccgtatcggtaaagtagaatatcgtgtatctggtaactttgcctataaccagaacaaggtcagtaaatacaaaggagagctgcagcgtggctgggtgacagatgaaaacgggaaccgtgtttatcaaaccaatatcggcgatgtctctaccggaggatctacccgtgtaatagagggtaaaatgattaatgaatactatatgttgcaaccatataagggcagtggaaacggttttaacgcagatggaacagtcaatatcaacggtggtccgagagacggaatgatccgtacggtagacgacatgaaatggctgaatgctatggtaggggcagggtataagttctatccgcgtcagaacgtcagtaagagtggcatttggtatggtgattacatctatgctgacttaaatggcgacggtgtatatggtaatgacgctgataatgagtttcagggatgctccaatgtgcccaagtataacttcggtctgcaggcaagcgctaattggaaaggcttcgatttctccatgaactggtccggtgcggcaggtttcaagatttactactatcgtttggcattgaacagcagtgctaccatcaaaggatatgctattggggaagcaatagcaaacgatcactatttctttgatcccaaaaatcccaatgatccgcgcacgaacttgagttcaaagaatcctcgtttgacaaataactccggtaacgaccaaagtggtatgacacagtcatcagtacatttgcaaaaaggggattatattaaactgaagaacctgactatcggatatacattgcctgctgtcctgtcgaaaaaagtatatgcacagaatatccgtttctttgcttccggtgaaaatttatttaccattaccgggtatgaaggaatggatccggaaatgcgtaccgcagtgggatattctactatgagacaatatgcattcggtgtaaatatcactttctaaacttactctaaaacgattttatgatgaaaaacaaaataaaaatatttcggaaattagtaagatgtgcatctattgccttgctgtctttctctatggctggatgcggtgcggactttttagatactactcctaccaataacataagcggtagtagtatctggacgaaagcaactttggccgaacaggctgttatcggcgtatataatgtctttctggatcaatattgtcctaactccggcattttggattcgcaccggattccatgggatgcttattcttctgtgatggatacagacaagaactggattaagcgaatgcctaattgtacaggagcagctactccctcaagtggcctgttcagtgatatttataaacgtttttatacttttatctatcgtgctaatgatgtgatagataatattggtcaggttcctgatatgtcgaccggagagaagcaacgggctatcgccgaatgtaaattcttgcgtgcatttgcttatatgcgcttgaatatcttgtataaaggagtgccgttatatatgaatgcaatcacgagtcctgaaaacggtaacaaagcccgttcttcagaagcggatgtttgggcggctgtactccaggatctgacagattgtgtgaatgaacccaatctaccgggtaaatataattcgggtgactctaactatggacgggtaaccaaaggagctgcttatgcattacgcggacaagtatatatgtggcagaagaattgggaggcggcggttgatgattttaattctgtggctgactgtggcttcgggttatatactaaggccggtgctaccagttataagcagttgttgaaaatagcaaatgaataatgtgaagaaatgatattctctgtgcaatgcatcaagcaatacggctactccaatacaaggaacatcacttacggcaaccgttgtacagcaggttctatgtggaataactatttgcctaatccgcattttgtagaatcttttgagacggcgaccggagaaaagtttaattgggataactacttgccgggctatagtgcgatgaaagaaaaagaacgtgtggtgttttttctacgcgatggactgtctgcggcggaaaaggaacgtatggctgcctatggggcagatatgaacaaatatctggatagtggcaatgaagcacgtatcaaaaaagcttacgagagccgtgatccacgtctgcaaatggctgtcattaccccttacgcacaatacaatggcgcttcttctggaatagctcatacttatacattgcgttggccttatcgtggctccgacagtgcagagccttttgatatccgtactgatacaaacgataagttttactatctatggagaaagtttgttcctgaaggtctggaacagacagaacgtgatacttatggattggatattccattaatacgctatgcggaagtattgctcctgaaagcagaagcgctaaatgaatggggaagtacccatgaaagcgaagcaatcagatgtgttaatgaagtaagacgtcgtgcagggcatgtcgaattgaataatgcaacttatcctgctacgaaagttaacgggcagagtgatttgcgtgaacgtatccggaatgagtattactgggaaatcggtggcgaagattccatgtatttccatgaattgcgttggggaacgtggaaagataagaagtttgataataatcgtaacggtctgatgcagatgtggggtgaaacgacttatacctggtactggttgggagatcagtgctggagctggcctattcctgctaaagaaatggaaatgaactcgaatttggaacagaatgaaggttggataaattaatcttagttttaactaataaagtatatatgaaaaaaatatcttttttaattgcgacagcattgtgtatcatggcatgttccggtggctctgacgaacaaccggatgggccgggtaacggtaatggaaatgggggtggggggagtacccctaatcctgtttcattctccaatcctatagtcggcaaacagttgcctgatccgactataatccatgcggcagacgggaacttttatttgtatgttacccaacaggataatatctatattccgatttacaaatctactaatatgacacagtggacttatgctggggcagcctttctgcaaaaaccgaactggcagccggacactcgcttatgggctccggacattaactatatcaatggtaaatatgtgctctattatactctcgggcactgggacttgcctaagaatagttgtatcggggtggcggtcagcgactctcctgtaggaccttttacggatcacggaaaacttcttgactacaattctggtactatgcagtgcatcgacccttgttattttgaagataatggtaagaagtatcttttctggggaagttataatagtacttctaaaggctatgaaggaggtatccgttatgtagagttaagtgctgacggtctatccattaaaggtgctgtttccgaaaagatagcgggtccttcaatagaaggcatcatggttcataaacgcgggaattattattatctatttggctctacgggtagttgttgtgaagaggaaagaagtacgtaccgtgtagtggtggggcgttctaaaaatatcgaaggtccttatgtgggtaaaaacggtactgtgatgaaagaaaatagtagttataatgaagtaattctacagggtaataacctgtttgccggaaccggacacaattccgaaattatcacggatgacgagggtaatgactggttcttctatcatgcctggcagaaagcgaaaatagataatggtcgtcaattgatgtgtgaccgcatacaatggagcagtgatggctggccttatattactaatggcacaccggcatccgtatctcgtgcacctgtatttaaaaacgaagaagaaaaagagtaatctatgaaactattcaactatttattggccgggatattgtgtgcttctgtcacttgtctcccggcgcagcatcgggctgatccccagaaattggtcaatccggaatccttttctatgattttgctcggtgatccacagggatataccaagtatgatattaaccagccgctttttgatctttgtaccgcatggattgcggacaatatagagtcgcttaaaattaaagctgtcctttgtacaggcgatttggtggagcagaatgataataatgtattaaaccgtaagatgctgaaccagaccagtcgtgaaatgtgggaggcagcatcgcaggctttgaaaagactggataacaaagtaccttatattattgccgcaggcaatcatgattatggatacaaagccgcagaaaacggtcgtacttattttcctgattatattccttttgaacgaaattctacctggcggaatatctgtgtcagtgaatttcctaatcgtgaagacagggcgtctttagagaattcggcttttgagtttgatgagccgggatggggaaagattttggttatagcagtagagtttgtgcctcgtgatgaagtgctgcaatgggcgaaaaatttggtaaacaagccggaatacaagaatcataaggtgatttttatcactcattcttatcttgatataggtaataagcgcgttacgaaagatgggtataagatttctccacaaaactcggggcaggctatttgggagaaacttatttatccttcttccaatatccgtctcgtactttgcggacatgtgggaagaggcaccggtgaatatgagaataatgtggcttatcgggtggataagaacagtgccgggaaagatgtatcacaaatgacgtttaatgtacaatatgtaggaggcggtccggaagggaacggaggggatggttggcttcgcattctggaatttatgtcggatggtaaaacgatcaaagtacgtacttattctcccttgtttgggatttcaaaattgaccaggcatctggcacatcgtacggcaccttacgatcagtttgatattatattggaataacttgacctagtaaaaatactcttaatagaaataatgtagatgagaaaaattgtatgttctttagtgatacttattaatagtgtttatctatttgcacagtggaaaccggttggcggtcgaattatgacggaatgggcggcgaaaatagatgttgaaaacgtgttgcccgaatatccccgcccaattatggaacgtgctgactggataaatctgaacggattgtggaattatgctatttctccggtaggtcaagctatgccacaaagttatgatggtcggattttagttccttttgctgtagaatcaagcttgtccggagtggggaaaagtcttggggagaagaatgaactttggtatcagcgtcaattctcggttccctccaaatggaaaggacataggatcttattgcattttggggctgttgactggaaagcggatgtttgggtaaataaggtaaaggtgggacaacatacaggaggatttactcctttttcttttgatatcacgcctgccttgctgaatggggaaaatgaattgatcgtgaaagtgtgggacccgactgataaaggtcctcagcctagaggaaaacaggttagtaagccgggaggtatctggtatactcctgtcagtggtatttggcaaacagtttggctagaacccgtgccaatccggtcgattgtcaatatcaaaacgactcctgatattgacaggaataagttgacagtagaggttatgacagatcatcagatgctttcagataaattggaggtgaaggtattagaaggaaagcagttggtggctgtaggaagttccgtaaatggtattccggttgaaattgctatgccgtctgatgtaaagtggtggtcaccggattctccgtttttatatgatatggaaatttgtctgtattcagaaaataagttgatcgataaggttaagagctatactgccatgcgtaaatattcaacgaaacgcgataaaaatggaattgtacgtctacaattgaataataaggacttgtttcaatttggtcttttagatcagggctggtggccggatggcttgtatacggcaccttcggatgaggctttagtatatgatattcaaaagacaaaagattttggatataatatgattcgcaaacatataaaagtagagcctgcccgttggtatacgtattgtgatcgtttaggggttattgtgtggcaggacatgccgagtggcgataagaatcccgagtggcagaatcggaagtattttgagggaacagaatttaaacggtctgctgaatcagaggctatttatcgtaaagaatggaaagaaattatcgactgcctttactcttatccttgtattggcacatgggtacctttcaatgaggcttgggggcagtttaaaacccctgaaatagcagaatggacaaagcaatatgatccttcccgtttagtgaatcctgccagtggaggtaatcattatacctgtggtgatatgctcgatttgcataattatcccggtccggagatgtatttatatgacgcacagcgtgcaactgtactcggagagtatggaggaattggtttagtgctgaaggagcatctttgggagccgaatcgtaattgggggtatgttcagtttagtacttccaaagaagctactgatgagtatctgaagtatgctaatatgctgaaggatatgattgcacgtggattctcggctgctgtttatacacagactacagatgttgagatcgaagtgaacggattgatgacatacgaccgcaaagtaataaaactggatgaacagaaattgaagagggcaaatacggaaatttgtgaaagtttaaagtaagaagccggattagctatttggctgaacaaaaaactcatctgtagccattcgaattatagatatagtttgcaatattatataattgagaaaacagaattcagatactttctttgtatctggactctgttttttttgaatatataattctatccattccttcatttttcagtgaaatgtaccaaaattgtccttcatttggattatttaggtcggtcaattctatttaaatgcactacttttgccatcaggaaaattaatcacttaacaaataatccctgtattatgaaaacaattcttagcgcattaggactttccctattgatctttacgagttgcggtggacaaaaaaaggttgaagtagactttattcaggacaacatcgacaacgctgtggcacagaacacaatccagacggacattattgagaagtccggtaaaatcttgaatccgagaacaatcaacgaagatgggagtatctcttacataccgatggaagactggtgctccggtttctttcccggtagtatatggttgacttataatctgacgggtgataagaaatggttaccgctggctgagaaatatacagaagctcttgattctgtgaaatatctgaaatggcatcatgatgtaggtttcatgatcggttgcagttatttgaacggctatcgcatggcagataagaaagagtacaaagacgtcattatagaagctgccaaatcattgtccactcgttttcgtccgaatgcaggcgttatccagtcatgggatgccgataaaggttggcagggaacacggggatggaaatgtccggtgattattgataatatgatgaatctcgaactcttatttgaagcaacagctctttccggagattctactttctacaatattgcagtgaaacatgctgatacaacaatggctcaccacttccgtccggacaacagctgctaccatgtggtagattacgatccggagacaggagaagtgcgtaagagacaaactgcacaaggatatgccgacgaatcggcttgggctcgcggacaagcatgggctctgtatggatatactacctgctatcgctataccaaagataagaaatatctcgaccaggcacaaaaagtctataacttcatctttaataataagaacctgccggaagacctcgtaccatactgggattatgatgctccgaatattccgaacgaaccgcgtgatgcttctgcagcagcttgtacagcctctgccctttacgaactggatggctatctgccgggcaaccactacaaggaaacggctgataagataatggaaagtttgggctcacctgcttatcgcgcagaagttggaacaaatggaaactttatcctgatgcattcggttggcagtattcctcacggtcaggaaattgacgttcctctgaactatgctgactattacttcctggaaggactgatgcgtaaaagagatttggaaaagaaataagaaatagacaatgaacggtaaacagtgaacggtgaatgcttagcggattctgacggaacatgtttaccgtttatcattcgctacttattatctataactttctattgaccgtttgtcatttacctgttttaattatttatcataaactatcatgaataaacctataaaccttcttgtaggaggcttgacgctctttgccgcacaaggttgcaaggctccgaaacaagcgtcccaacaagcggagcatcctaatataatctatgtatttcccgatcaataccgtaaccaggcgatgggcttctggaggcaggacggattccgggataaagtaaactttgaaggagaccccgtgcatactcctaatctggatgcctttgcacgtgaatctatggtcttgtcgtctgcacagagtaactgcccgttgagcagccctcatcgtggaatgttactgaccggtatgtacccgaacaaaagtggtgtaccattgaattgcaactctacacgtccgatcagctccttgcgcgaggatgcggaatgtatcggcgatgtgttcagcaaagcaggttatgactgtgcttattttggtaaacttcacgctgacttcccgactccgaacgatcccgaacatccgggacagtatgtggaagaaaaacgtccggcatgggatgcctatacaccgaaagaacgccggcacggctttaactactggtattcttacggaacatttgacgaacacaagaacccgcattattgggatacggatggtaagagacacgatccgaaggaatggtcacctttacacgaatcaggcaaagtcatttcttatctgaaaaatgacggtaacgtacgtgataccaagaaacctttcttcataatggtgggcatgaatcctcctcacagcccgtatcgctccttgaatgactgtgaagagcaggattttaatctttataaagatcagcctctggatagtctgttgattcgtccgaatgtcgatttgaagatgaagaaagcggagtctgcacgttattatttcgcttccgttaccggagtagaccgtgctttcggacagattttgacgacattgaaagaattgggattggataagaatacagtcgtaatctttgcttccgatcatggtgagacgatgtgtagccagcgcactgatgatccgaagaattccccttattctgaatccatgaatattccgttcctggttcgttttcccggtaagattcagccgagggtagatgatttattgctctccgctcctgatattatgcctacggtgcttggcttgtgcggactggatgattctattccggcggaagtgcagggacgtaatttcgctcctcttttcttcgatgaaaaggctgaaattgttcgtcctacaggtgcactgtatattcagaatgtagatggtgataaagatgaaaatggattggtgcagacttacttcccttcttcaagaggtatcaagacggctcaatatacattggcgttatatatcgaccgtgatacgaagcaattgaagaaaagcctcttattcgatgatgtaaaagatccatatcaactgcataacctgcctttggaagaaaataaggagattgtggcacaactttgcggtgaaatgggagctatgttgaaggaaattaatgatccttggtatacggaaaagattctgtcggatcggattccttattagcgattagtaatttataaaacgctgattaactcaaataagtgccaattttaggagtaaatctctgcgacaataataggtgttaatccgcatccgcgtttaaattgaaaatagtaatgaaaaacagttgttttatagtattattccttttgggaatcattccttcagctttcgctcaactcatcggatttgaagaagaagtgcccgaagcatttacagtttccggaaagggagaagtgaaaatctcttctcttttttacaaagagggtgaaagtagtctggaatgggactttcagcccggttctacgctggatgttcaaattgctcctttatcgttgaatacgagaaacgagaagcagttcggcattaccttgtggatttataatgagaaaccgcagcaggattctattcgttttgagtttctgaataaggagggagaagtctcttactggttctcttatcgtttgcaggcagcaggctggcgggcttgctggatctcttttgagtatatgcagggcgacaagaaagataagaagatcgtagcctatcggctggttgccccgcaacggaagggacgtatctttcttgaccgtctgatttttccggaaaagaaaatgaatcttcgtaccactcccgaccaacagttgcctaccaataatgggctgtctaatcgtgacctgtggcattggtgtctcgtgtggaaatgggaacaacagtcgtatgatattcctctgccttctaaattgacaagcgaacaaaagaaggagctgaagactatcgaacaacgtttgactgactttctggaagtgaaaaaggctccgcaaggaccgattaatgctgcctataaaacatttgagaaagcggctatcagtccatccatcgctgggacgggatttataggaactcctattgttgctcctgatgaacaggacaagaagaaaggagaaatgtcatggaacgatattgaaacgatgctttccggctttgcctatgatgcttattataaccagaacgaaacatcaaagaaaaactactttaccgtattcgactatgctatcgatcagggatttgcatacggtagcggtatgggtaccaatcatcattatggttatcaggtacgtaagatatatacaactgcctggctgatgcgtgatgctatctataaacatcctcatcgggatgcttatctctccacattgcgtttttgggcggctctgcaagaaactcgtcagccatgttctccaacacgtgatgaattgttggattcctggcatacgttattgatggcgaaatttatttccgctatgatgtttcccgatgcaagggaacaggcgcaagctttgagcggcttgtcacgttggctatcttcttctttgcgttatactccgggaacgatcggtggtataaaggtagacggtacgactttccatcatggcggtttctatccgggatataccactggagtacttgcgactgtaggagaatatattgcatttaccaatggtacaagttttgaactgaccgaagatgcgcgcaaacacatgaaatcagcctttattgctatgcgcaattattgcaatttctatgaatggggcatcggaatcagtggccgtcatccttttggagggaagatgggaagcgatgatatcgaagcatttgccaatatcgctttatctggcgatttgtccggtcagggaaatacgtttgatcgtggtctggctgccgactatttacgtctgatacgcaatagtgatactccgaatgcgcgtttcttcaagaaggaaggtattcaaccggcacaggctccacagggattcttcgtttacaactatggttcggcaggcattttccgtcgtgcggactggatggtgacattgaaagggtataccactgacgtatggggctctgaaatttatacgaaagataaccgttacggacgttatcagagttatggctccgtgcagattatggggaaaggaaatcccgtgtcacgtgccggaagcggttttgtgcaggagggatgggactggaaccgtttgccgggtacaactaccattcatttgcctttcgatttgcttgatagcccattgaaaggaacgactatggcacgctccaaagagaatttctccggaagcagttctttagatggtaaaaatggaatgttcgctatgaaattggcagaacgggattatgagaatttcacaccagactttgtggcccgtaaatccgtattctgttttgataaccggatggtttgcctgggaacaggtatttcgaactccaatgtggattatcctacggaaacgactcttttccagacaaaatataatggtaaggagcccaaagtaggagaggataactattggcttcatgatggttatgacaattattatcatgtagtggacggaaccgttcgcgcacaggtggcagaacaggaatcacggcacgaaaagacgcgtgaagttactaagggaaaattctcttctgcctggatagaacatggcaaggcaccgaaagaggggacttatgaatatatggtattgatacagccttctgcttccgatctcgacgaactgcgtaaaactcctgcatacgaggtgttgcaacgcgatcagactgctcacgttgtttatgataaaaagactggtatcacggcgtatgccgcttttgaagcttatcagcctgccgctgataaagtggtcgtcgctattcctgcggaaacaatggtgatgtatgcaaaagaatctgataagggtatccgtttaagcgtctgtgatccgaatctgaatatagaagagaagacgtatacaacgaaagagcccagtcgtcctattactaaggagatacggcttaaaggacattggagattgacaagcccgatggaaaatgtccggttggaacagcagggagaccagaccgtactgacagtaacctgtcagcatggacagccggtcgaaatgctcatggaaaataaataattagtgaataagataagagaaaacaagaatttaaagagaggtattagtcatcatgtttctatgaaaaaagagaagaccggttcatggggagccggtcttctttgtatttacacggtgcgttgagcactttcttttcttgttacttattcagtctccattcgaaaccgtctttagtatctttgatttcaaatccgagtgctgtcagtgcgttgcggattttgtcggaagtagcccagtctttgttggctttcgctttcatacgttgttccagtaacatatctactaccttgccgtaagctgcttcacgaccatctgaagagcctttttcttctttcaatcccatgatgtcgaaactgaacagatggaatgtttctttcaggtctttcaggtcttcggcggagatggtggcattaccggcaatgatattgtttataatgcgggcgccttcgaaaagctgtgcgatgacaatcggtgtatttaagtcgtcattcattgcttcgtagcatttagcgcgcagttctttcacgttgattccctctgaagttgccgatgcgggagtaatcttatccaatgcgtcaatggcttccatcagacgctgcaggcctttttcggatgcttgcagtgcttcattgctgaaatctaccgtgctgcggtaatgagcttgcaggatgaagaaacggattgtcattggtgtgtaggcttgtgccagcagcttatgagtaccggtgaagaattcgtccagcgtgatgaagttgccaagtgatttacccatcttggttccgttgatggtaatcatgttgttgtgcatccagtagtgaaccatgtcatcaccttgtgaggctaccgattgtgcgatttcacattcgtggtgagggaaaatcaagtccattcctcctccgtgaatatcgaagtgttcacccaggtatttgcgtcccatagcggtacattcggcgtgccatccggggaaaccatcgctccatggagacggccagcgcatgatatgttcaggttgtgcctttttccaaagggcaaagtcggcgggattgcgtttctcgctttgtccgtcgaggtcacgggtggtattcaagacgtcgtccagattacgtccggaaagttttccgtagtggtaatctttattgtatttggctacatcgaagtagacggagccttcgctttcataggcatatccggcatccaaaatcttctgtaccagttggatttgttcaatgatatgtcctgaagcatgtggctcaatgcttggagaaagtacattcaacgcttccattgctttatgatagcggttcaggaaatattgaacaacctccattggttccaactcttccagacgtgctttcttggcgatcttgtcttctccgtcatcggcatcgtgttccagatgacctacgtcggtaatatttcgtacgtagcgtactttatatcctaggtgggtgagatagcggaataacacatcgaaggttatagccggacgggcgtgtcctaaatgggcatctccgtaaacagtcggtccacacacatacatgcctacatgaggtgcatgaagcggtataaacaactctttctttctatctaaggtgttgtaaatggtaagttgatgttccataacattttatatttgttttattggaatcgcaaagttagtataaaatctgaatatgcgccctatctttaatcggttgattttaagtgtcgggtcgtttttaccagtaatgtgatttgtttcccggtatgaaactaacagtttcacaccgaggaaccaatagtttcattccttgaaaccaaaggtttctcaccgagaaactaaaactctgccggcatgccagtaaatgtttggctattgttgattgcaaaacttcttgattgcttctgctacaccgtcttcttcgttacttagagtgatgtaatctgctgctttctttacaggttcttgagcatttcccatggcaatccccagtcctgcaaacctaatcatggataggtcattatatccatcacctatggctataacttcttcacgcgctactcctatttcttttaataggacggccaaagaaagagccttgtcgataccttgcgggactaattcgagaaaatagggttctgaacggaaaacattaatgcgaccttgtaaccggagacaaagttcggcttcaagtggaatcagtttatcggcatctcctacgatgaggcatttggctacgggaagcgtgatgtctgtcaggaagtcatttgtctcccgaactgccattttattgagaaaggcttcttttaatacgtatggatcttgagagttttcggttattatctctgctccgtcataggttaatatacttagttgatgggtacgggcacattcgtagagcactggaacaacttcattaggcaacacattttcatataccatctcttgtgtttcccaattaatgatttctcctccgttataggacaggatgaatccaccgaattcattcatacgtaactcattagctaatggcacaataccataagtaggtcgaccggaagctaataccagtcgtattccttgctcttgcatacgtatcagagtttccctgttgcggggagtgatttcctttttagagttggtgagtgtgccgtcaagatcgagcacgataagtttgtatttcatgtagggttgtttttggatgcaaagataaattaaaaaagtttttctgcaaggtggtgggggaaaagatgtggttttagctgaaattgcactgtgatagtgcaatatacaaaaaaaggatacctgtagggcatccttttttgtattgagaaacgtgagtttatagtttattggttaatagtagacccgaatcctgtatatgcattgtctggtataaagatgcctttatccaaatccattgaagtgaacggactatttgccaggcgaagtaattgttcttcgattgggttggtaggcttaactgttgcgccaaaactattccatttatttgtttcggtaagtccatatgctatattatctttcacatcgaattctggagtactttctgttttataaataccacacattgtagcgtcactattcatgttgggatctgcatagaaaatatttttcgagatcgtcatctttgtagcatcgtagaattttagatgatagttcttccctacatagtttacaatgctattattacagaaggatacttttatttgttgctggtcgggggtttgtacaatcttgttatcccatgaaagaatctgtccggcaacagatgttttattgtatacaatgttattttcaaaagtaaacatttgcattgcgtctaagtgtgttgttttgtagatattgaatattagaataccatctactgtagtatttaattggaaacgtgaattctttgcataaatattcttgattgtataagttgctacattgttataataaaagttcttttgaatattagttatttcacagtcttcgaacacaaagtcttcaaaatctgcagtagcatctgcattacagaacatatacttattattacctccactagcatcaattttagttaggtctaattgtatatttttgaatatcaatttaccagatttgagtttccacaaaagctctggtttcagtataggtttactgtcactatatcttccgattataacaactgttcctgtgatttcagcaatggatggtgtgttaaaatcataagctcccttttccaagaaaataacagtttgttctgtcttttgatggattaggtttctgatattagaagcactctcatcagagccatctaataatatagcttcatttgctccttttgttatagaaacatttccaatagtaatattcccatttgtattgtactctgtgtagaagtctttggattgtggggtatctataactttaacctgaatctttgcaatcatagcatactttccacttgttgccaataccgcaatatcagtactgttatcagctgttgcacgagtcatcatctttgcgcttgatgcaggagcagtaacaaccaatacattttcttttccagcttccttagagaatttagcactccagccttcgggagcagtaatcattgtattttctactcctctcacggtcatggtaaactctttcacttcacctgccgaaaactcctgtacttgttttaaatcttcggctgcaaaactacattcgaaatcacgaacgatagggatacgtatggttggagcatcttcacctgcaagtactaagaccagttcgttgttttctactgttacactcttgaagtttttgtcttctgtcggagcagaaccgtcaccggttgcgctgactttgtcgttagttccttctttgtatatataactataattctttcctccgtcatagctaacctgccagtaaccttcactatctacattgaatgtaggagtcttaccactctctccattagctttcacaggttgtccgtttacagtcagacgctccggagtttcatttttgttgtaaagaacagtccagtagccttctgaatcgataccgataatagggcataacaggttattgtcgtttttcatatatagatttactgtctttccattgctcaaagtgagtgtgtaggaatcagacttttcctctatattagtaataaatgttccttcattataaagttcgcgaagagcttcagtattactatttatatcacgtacttgtgtttcgagtgcggtaacgcgctttttcagtgcgtctacatcatcttccaaatcgtcaatgttggtacatgctaccaggcatacagccaataacatgaacatactccatacttttttcatgattatattgttttaaagttattattttaaagaggatagccaggaaggaacatatcccaaacgtttacgtaattgagcctcatagagtgaatatggttccacagcagttccgttactttcgagccgcttcatttgagtatcatcaaaatctaaaggacttccgtggaaaccgacaatgataggaggcataaatttccaccaaaagccgttaccatcccaccaggtaaatttacctcctgtatcgatgtcctggtctgtttgtgcatttgttgcgtagaaattccatattgtcagattctccatgtgattaggcatttgagcagagtctcctccttgtctccaatgcatgaaaccaccggaacagcagtcgattagtgttgcacgtggctgtgtggcatgtgattcaaagcaagaatcatctccccatctaacattccatattacagcacccatactttgctttgaaacgccgcaagcgtgatattggccaacgttcgttttatattccatcaatgtgctttcaccttctccttttctaagtgtgtagccattgctgttttcagttacttttccaataaagatacgggaagaagcctgtgaacggatagaggcgtgtccacgattaccgccaatagtgatgtcataagcagaacagttggcagaatttgtgattgacatggcttcactaacactctcaaaattaacccggcgcatccacgaattggtcagacgcacaaaatcgatgagcttaaaaccaccatcgtcaatgtcagagccgtgatggatgaatttttctttggcatgtcctttgaatgtaaggtcttctacacccacattggcataattggcgaatttatgtacattccatccccaatctttattgatggcgtgcatgatcggctctttgaaggtgacactattaccactgattttctcaatctgatgatattcgtatatctgaatcccttttgtcttgatattgggagtaccgccttgctgtatcttaatatcttcccatttgtgtggatataattcggagttaattacattgtcatccgtattttccaatacaaggcatacccaactgcctgcgcttactccggttaaactggctgttatggttctgctgcctatgggagcatcttcagtgataacacctattgattcttttaatcctgtattgtgtttgaactccatcatgacaggagcattccacatttcttctgttggtttcggagaattatttgcagcagtcatttcgagtgttgttttgtttcttccggctccttttaaaacaatatcactcattgatatacgaattctgcgatctttagaatcctcatcttgcaggatataatttccttcggggaagtagataatagctttagcattttccttgatatatcggtcggtcatattgaggtcttcttgctttgtttcacttgctatttcttccaataccttcatgaaagctgctctgtcagatttgccgtcgtttgggatagctccgtatttgggatctgtaacatcatatactttatatccttgtgctattaatgtttctgtttcaggaggtgctatttcaccatgtttatatccggcgtatgaaaagtctaataacacattctgttggtcagcgttaacaaactgctgccaggcttctgctccggcttcgctggaaagttgtttaacttcaatagatacaatacggatataattctttgatgaagtcagtacaattttaatagtttcttccatatcctttgtcgcagttgcttgtggtgtgatagttaacaagttctcggataaaagaacattccatcctttgggagcttgtactacggcttgttgtacgtcattctgttctactttatattccttatgattctcattgggggcgaaaacctgcacagtttgttcgctgtcggcatcattgagaccataaattatcagtccaaaggtgtcatctaccggaaaggtatatgtttttcctccatcggataatgtgaatgagaaagtatggtttgcttcattatattctaccttactgaatatactggttcctccctgacttccaccttcggccttagttcctaagcttgtatacgtttgtccattatcgtagctcacttgccaatatccactggaagatacgctgattaatggagttgccaccacattgccttcttcatcacggggccatgctgatactttctctccatcggctcctggcagatatttgaaattagtattattacttgttttatatatccagtagccttcttcgtctacggaaaattcagggacagacgcctgtactgcttcactttccatgactttaatgcttgttccgtcactaagttccagcaaatatcccagaccatctttagtcggagtaattccgataatgactttgtttttttgcataagggcttgcagactggcaaatgaagtattcagtccttccgttgctttttccaaagcagcgacacggtctttcagagaattgatgtctgcttccaggtcatctgttttctggcacgattgcatgattgccaacatgctgcaaataccaaatagtaataggtaggtaatgctcctgtttttcatacgtttattatttcgggttatttataattttcacaatggcaaagataaccggataaaataagagtatatggataaaaaaattcaggaatacgatgaaataatacattttacacgtctctgtgatagattgcgactttatgtattattagagcaggtctacccattgctcgttgcttaatataggtaatggctcactatcagtaacaaatgtttctgccagtttccgtttctcatcttgtaggtgaagaatcttttcttcgatactgttttgggtaatgaagcggtaagcaattacttgcttgtcctgcccgatacgatgggcgcgggcgatcgcctgcgattcggcggcaggattccaccaggggtctatgataaatacatagtcggcttgagtcagattaagtcccacgcctcctgcttttagtgaaatcaggaatgcctggacgtctttttgatcggtgaaatgggcgatttcggaaggacggttgttggtcgatcctgttaataaggcatatttccaaccccgttcgtggaaagcttcggcgagcacctccagatgtctgacgaatgaggagaaaattaaaactttgtggccttcgctctgtagcgtatcgaatgtttcgattatctgtgccgtttttccggatgttccggtatagtcgggaaggataagttgcgggtggcaagatagttgtcgtaaacgtaagatgccatttaatacactaaacgaatgaagcctgtcggtactttgaggatgctgaagaaggatgttgcgcaggctgtttttctcctgttcgtaacaagtattctgctcttcagtcatgtcgcagtagatggtctcttcggtaagtgccggaagttccggagctacctctttcttgcttctacggaggataaatggggctgtcagttgttgcaataatacttttgcacgggcattcccctgacgaatcggcattataaactgcttttggaaagcattttccgtacccagtaagtctggttgtataaagtgaaattgagcccacaggtcttttaatgagttttcgatgggagtgccagtaagtacaagccggtgtttactttgtagtcgaatggctgaccggaaggtgagcgattcgctatttttgatattctggctttcatcgagcacgatgtattcgaaacagtatgaacagagtatatcaatgttattcctcatcatgccataggtcgtaaagatcaagtgaaaatgaccgaagaatttttccggttgttccttgtctatagacacggtgttgttgtattccgtcatcgagagagctgtaaagcgtttggcttcccgtcgccagttatgaagtagcgatgtggggacaacgatcagggtagccggttgtctgggggtagatggtttatatatatattgtaatagagtaagagtttggagtgtcttcccaagccccatgtcatctgccaggcatccgccaaatccttgtttatgcaagtgtaccatccatgagaatcctttctgctgataaggacgtaacgttgctttgaggtttttgggtacggcaacattttgtatctgttgcttcgccggaaatttctttaattcctctttacctaaggcggtctgtgcagcaccaacaaacgtatgtttcaagcggattcctttttccgtttgaattcccatctctagtaaattcgcatatttgctgaaccattcctctggcaggagaatcatgcggtcatcaggtaacagatattctctcttttcctccaggatatgtttgcggaaacgtgaaaaaggaatacgcagattgccgataacaacggtgatgtgcaattcaaaccagtcgacctcatcgtcgcaactttgctcgatgcgtatctcgtccaggcaataaggtgtgtttcccatattgctggtgagatggaaggactgctgcaacatctcccgatggttgttgatccattcgacgatcgttttctccggagcttcaggggataggctgaaatgtgtatcattgagttgtcgcaggcctgcatccgttaagagctgaacggcttgttcttcagcagtaatgttccggcgaaaaaagaagatttcaccggatgttttccgataaatgatttttttcatttcaagggcactatccggtgtaaatgtctgatctccataacggaaaccaagctgcaatgcttgtccgttgtacgtggtatcttcgaatgagagaattgcttcacaggggcatttctcttccattatattcaaaccgtgagtctcgatttcatgataacgagcaatcgggataacaatgttatctatgtatttttcaatttgggaagcgtctacgctgatcgatcttttctttgtaaaaggtaagatgcgtgcgctttcaatgtgcggaaagaagtatagctccattcccaataatagcgtggctggtgcggatgtcagtacaaccacaggtttcaactcacttaaagagaatggctgtccttcataatagcactgcaactgataacgaaacgttttattgtcaacatgaaacgttacacgaatttctgcattatgaggatttatgtgataggcatgatgggcgtatagtattttactgccggcttgtttctgataaaaaggcagtccgttgtcccgtatcagtaccagcatttccaacagtttcttttcgatagatggatggatatcattctttattcgttccggatcttcggataatttatgtaaaaaacgcgatactgttttttcgcgggagtagacactcattagatgcttctctgtataataagaggcgatatgaatagcttgtctttctgcctcactcatcttgctcatagcttcgggagaggcgtgaaatgcttgttctaccaattgcaaggtaccatcgtccagcttttccgcaatatagggaatcagtaatatgccgagtatcggatgctctgtgaaaacgattataacttgtccgttagttggtctctctttcattctcttttagactttaacaaacaaagatacgggaaaatacttaattttgcagcatgatggaggaaaacaaacgagtattgcttggaatgagtggcggtacagatagttctgttgctgctatgcgattgctggaagccggttatgaagtgatcggagtaaccttccgtttttatgaattgaatggctcgacagagtatctggaagatgcccgtaatctggcagaacgtttaggaatacggcatataacatacgatgcccgtgaaatattcagtaaacagattattgaatattttgtgcaggagtatctggcaggacggactccagtcccttgtatattgtgcaataattacctgaaatggcctctgcttgctaaaattgccgatgaaatgggcgttttctacatcgctaccgggcattatgcacagaatatacaactaaataataccttttatataacatacgctgccgactcggataaggatcaaaccttctttctatggggattgaaacaagatattctttgcaggatgttgttgccgatgggggatattacgaaagtggaagctcgtgtctgggctgcggaacatgggttccggaaggtggcaactaaaaaggatagtataggcgtttgtttttgcccaatggactatcgaacttttctgaaaaactggttggctcaaaataatgaggcattggcagaagaagagcagatgatgggggagaatcaagcattggttggagattggcaagtattggttggaagcaatcaggcaggactcaataaagtgaaacgaggaaggtttgtcgatgaaaagggagattttattgcctggcatgagggttatcctttttataccattggacagagacgtggcttgggcattcatttgaaccgtcccgtatttgtgaaagagattaatcctgaaaagaacgaagtagtattagcttctctttcagctctggagaaaacagaaatgtggttgaaagactggaatcttgtcaatcaggagcgtactttagggcattctgacatcattgtgaaaatacggtatcgcaaacaggaaaaccatgctacgattaccattacaccagatcatctactgcatgtgcaacttcatgagcctttaaccgccattgctccgggacaagctgctgcattctataaagatggcttattattgggaggagggataatagtcaacgcccggtaattagccgacataatttaggcacggattacacggataaacacggaaagagaataaactttatccatgtaattcgcataatccgtgcctggaagaaattggagaggtgcttcgaaacgctctccttgtacaagtaatctctgtaataaagaaaactagtgtcggttatgtcttggtttttggttattcttccgaaagaatgctgtcattcagcgctaacattgtttctatatattcgcgcgtattacttaatctggggactttgtgttgtcctcccaactttcctctctgtgccagccaatcatggaataatccctcacgggcaacgattacttccaatggttgcagagctatatctttccatcgtttcgcctcataatcggagttgacctccttcagtgtggcatcaagtatcgctgcaaatttttctactgaatccggcatcttagcgaactctattaaccactggtgccggcatttggcattctcatccataaatacaggtgccgcggtgtattcactaacttgtgctccggtttcggcacaagcctttgccaatcctttttcagcgttatcgacaatcagctcttcgccaaatgcgttgatgaaatgctttgttcttcctgtgatgacaaacttatagggattcttgctggtaaacttcactgtatccccaatcatgtatctccataagccgcaagaagtagaaataaccattgcatagttcttgttgagctcgacttcttcaaggcaataagctcgtggactctcttttcctacttcctccagcggaacaaattcgtagaagattccgtagtcgatcattaataacatggcaggatcagagaggtcgttttgagttccaaaatatccttccgaagcattataagtctctacataatgcattttcggtgtttgaattacctgcttgtattgctcacgataaggagtgaaagccactccaccgtggaagaaaacttccaggttgggccatacttcttccaaagtctgttttcctgtcttttcaagaacacgtttgataagtaccagcatccacgacggtacgccggacaagcttgtcacatttaccggaatagtgctgttggcgattgcttctattttggtctcccattcgctcatcaatgcaattttcttgctaggtacacgaatgaaattgataagcggattcacattttgaatcagaatagcggataaatctcctactaaactatggttagagttgaggttcggactatggctacccccgagaatcagtcccttgccggagaaaaaatggctatccggattgatgcggaaataaagagctgccgcgtcttttcctcctctgtaatgaatgtcttccagtgcctctttgctaacgggaaggaatttacttttatcattagtcgttccggaggattttgcaaaccagcgtatctccgatggccaaagcagattctgttccccggctcgcaaacgttctacataaggtttgatttcttcgtatgtttggataggaacacgttttcggaaatcttcatagttacggatagaggaataatcgtactttcttccccattcagtttgagcggcctggcgtgttaagcggcttaacacacgatgctgtatctcactagcctgactagcatataggtctatctgttttaaacgggaatcgaaagtcttactaataatttttgtaatattcatttctgctttaacataataatgtttagtcgtgcaaaagtaacttatttatcttttttttctatctttacgacggaaataatcgttaaaaattgacgactttcatataaatcccgagttttagactaaaaaatgcgacaatgagaattggaatcttaacatccggcggggactgtcccggtattaatgccacgattcgtggcgtgtgcaaaactgccatcaattattacggaatggaagtggtaggtattcacagcggttttcagggcttgctgactaaagatgtcgaatctattacagacaagtcgctctccggtttgctcaatctgggtggaacgatgttaggaacttctcgtgagaagcctttcaaaaaaggaggcgttgtctctgatgttgacaaaccgtctttaattcttcagaatatccatgaaattgggctggattgtgtcgtttgtatcggtggaaatggaacgcagaagactgcagccaagtttgctgcaatgggagttaacatcgtatctgttcctaaaaccattgataatgatatttggggcacggacatctcttttggtttcgactcggcggtaagtattgctactgatgccatcgaccgtctacattccaccgcaagctctcataaaagggtgatggtgattgaagtgatggggcataaggctggctggattgctttgtattccggtatggcaggaggaggggatgtgattctcgttcctgaaatcgcttataacattaagaatatcggcaatacgattctggaaagactaaagaaaggcaaaccctattctattgtagtggtagcggaaggaattcagactgacgggcgtaaacgtgctgctgaatatatcgcgcaggaaattgaatatgaaaccggtatagaaacccgcgaaacagttttggggtatatccagcgtggtggttcgcctactcctttcgaccgcaatctttctacccgcatgggcgggcatgcaacagaattgatagccaatggccaattcgggcgtatggtgactttacaaggagacgatatagcatctattcctcttgaagaagttgcaggaaaactgaaattggttactgaagatcacgatttggtgattcagggtcgtcgcatggggatttgctttggctagttgccggagcttctgtggcctgcactgtggaaatctcatcgacgaggatgttttcttctgaaacattttccggttctatctcgggatttgtgttcagttcggtttcgggctcattctcaagcccgcttgccaattcagtctcagaattagtcgcaaattcaacttccatttctgtttccatttcagtagcagttgccgaatgttgtattttaatctcttcgatggttgacataaatgtcggttcctttaccttctttatagccatctgggcggcattctgttgagactccttcttggaatatcccgtacctgttcctgccggaagtccttcaatacgtacttcagtttggaatacagggttactgtcatgatcgagaaactgctcgattaattcaaaggaaacctccattttgttcttttggctccattcgataagtttggatttgaaattaacctcttttcgggatattttatccagatcgatataacggttgataatccgttgttccataaactgtttgcaacgttcatatccctgatccagataaatagctccgataaacgcttcaaaagcatttccgtacatgtagctgttgtgagaggaagaacgggtagaatacttgatgagcttatccaggccgatttcaacggccaacttgttcaacgtctcccgttgtacaatcttggaacgtgtattggttaggaaaccttcccgtttcccttcgaaacgtttgtagacaatatctcccacgatggcgtcgaggatggcgtcacctaaaaactccagccgttcattgttgagaggacgtcccttgtcggagcggacagaagtcgatttgtgcaggagagcctgctcataaagctggatattgcgcgggtagaacccgagtatccggtaaaaacaaagataagactctctatccttgcggaacaagagccttatcttatctatttcgttacgtaacacgatattactctgcgtatttcttgaagataacgcacgcattgtgaccaccaaatccaaatgtattggacaaggcaacattaacttcgcgtttctgtgctttattgaacgtgaaattaaggttatagtcgatattctcgtcgttgtcaccttcttcgtggttgatagtcggaggaacaatgccgttcttgatagcaaggatacttgcaatagattctaccgcaccggcagctcccagcaagtgacctgtcatagattttgttgaactgatgttcaactcgaacgcatgatcaccgaatacttccttgattgcttttgcttctgaaatatcaccaaccggagtagatgtaccgtgtacattgatataatctacttctttcggatccatttccgcatcttccagtgcatttttcatcaccaatttcgctcccagaccttctggatgagaagctgtcaggtgatgtgcatctgcagacatacctacaccggcaacttctgcatagatttttgcaccgcgagctttagcgtgttccagttcttccaggatcaggcaaccgccaccttcgcccataacgaaaccatcacggcttgcgctaaacggacgtgaagctttagaagcttcgtcgttgcgtgttgacagtgcgtgcatagcgttgaaaccgcccacacctgccgggaagatagctgcttccgaaccaccggatacaattacgtttgctttacccagacgaatcaggttgaaagcatctgcaatagcgttggttgaagtagcacatgctgaacaagtcgcgtagttaggaccatggaaaccatacatgatagaaatctgtccggctgcaatatccgaaatcatctttggaatgaagaacggattaaacttcggacccatttcctgacgagtgtagtagttgcctacctcttcttcaaatgtatgtataccaccaataccggcgccgaaaataacaccgattttgttcaagtcttctttctcgacgtcaagaccggaatcactcaccgcttctttagcaacagcgatggcatattgagtatacaagtccatctttcttgcttctttgcggtctatgtatttcgttgcatcgaagtctttcacttcgcatgcgaattgggtcttgaataacgacgcatcaaaatgagtaataggccctgctccactaaccccgttcacaaggttttcccaaaattcgggaacgctgttgccaacgggagtaatggcgccaaggcctgttactaccactctttttaattccatattgatgaaatcgaattacttagcgtgttcttcgatataagatacagcatcacctacagtaccaatcttttctgcttggtcatcaggaatagagataccgaattctttttcgaattccatgataagttctacagtgtcaagagaatctgctcccaggtcgttagtgaagcttgcttcggttgtaacttctgattcttctacgcctaatttatcaacgataatcgcttttactcttgatgcaatttcagacataactttaagtttttaattaataattagttttatttctttaaatttgcggtgcaaaggaatgaatatttatcgttttgcgcaaatatttgactaaataaatgcaaagttttgcacatttttcactgttttgtgcatcgaaattgagggttatgaagaaaaacatcgcaatttttgcttccggttccggttcaaatgccgagaatattatccggtatttccaaaaaaacgattccgttcaggtttcgttggtactttctaataaaagtgatgcatacgttttggaacgtgcgcatcgtttgggagtggcctgtaacgtgtttccaaaggaggactggatagccggagatgaaattttggctattttgcaggagtaccgcatcgactttgtcgtactggctggctttctggttcgtgtgcctgacttgcttttgcatgcttatcccgataaaattataaatatacatcctgcccttctgccgaagttcggaggcaaaggaatgtatggtgaccgggttcatgaagcggtagtggctgccggtgaaaaggaaagcggtatcactatacattatataaatgagcattatgacgaaggaaatgcaatcttccaggctacctgtcctgttcttccgacagattctccggatgatgtagccaaaaaagtgcatgccttggaatatgaacacttcccgcaagtcatagaacaagtattaaaaaaataagtattaggtattaagtattactccatgcggataatcgtttgacggaatttcatgaagttctcggtcgctacggttaatacttaatacctaatacttaatacttatttcttaatacttgattaaataagctgtctcttctcgccgcaaaggataatccccgcgtaaggtttcgaattgttccggttgatttttcaatcgggtgctatcttcgactggattatatatttggaggattgcttcttcatggtttttggcatgtataataggagaggcgggtgccggtgcgtttattttataatcagcttctatttggaagaatttgcaaatggcatccagtgacatgcgtgtggcgtttgcttttccatcggcagagtaacccgcaatgtggggagtgccgataaatactttatccagtaactcacggttaatttccggttcatgttcccatacatcaatgatggcatctgaaatgatccggctgtctagggcttttaaaagagcattggtgtcaatgacctctcctcgggaggtattaatgatagccggttttcgtttgagtgattggaagaagttctcatctgccaggtggaaggttttatatttcccttccttatataaaggtacgtgaaaggttatgatatcacattcttctgcaattttttttagtgaggcaaatagctctgttccttctttttcctcccgtggcaaatcattcagtaaaacgcacatgccaaaatcccgggcaactttagctaccttactccctacgtttcccactcctatgatgccaatcgtcagttcgtttaactttttgtttctgcaagatttccacaccagaagcgatgactgtatatattgggcgacagaagcagaattgcatcccggagcatttgtccattctatgcctgcctgtttgcaatactctgtatcaatgtgatcgaaacctatggttgccgttgctatgaatttcactcgactaccttccaataaattccggttgcagtgtgtgcgggtacggacgataagtgcgtctgcatcccgtacgagctccggagtaaaatctttccccggtacataaaccacctcatcggctattctctgaatcgcctcttttataaatggtattttattgtcgataataattttcatatacaattcatctttaatacccacaaaggtaacaaataaaaaagtaagaaacggttgcttgtctgaaaaatattacatagatttgccctattatatatctattagctagttaagattatgacatttagtaacctttgcaacgagattttttggaaatcgacaacagattaccatgtaacggatagtgtggatgctccgatgaacaatccttacgagttgaaaactattgagtattatttatatctaaagaactggattgatgctgtgcaatggcattttgaggatattatccgtgacccgcagattgatccggtagaagcattggctttgaaaagaagaattgataaatcaaatcaggatcgtacagacttggtggaactaattgatagctacttcttagacaaatacaaagaagtaaaacctctttctgacgcaacgatcaatacggaaagtcctgcatgggctattgaccgcttgtcaattcttgcattgaaaatttaccacatgcagcaggaagtggaacgtacggatactacagaggaacaccgtcttcaatgtcagactaagctgaatatcctgctggaacaacgtaaagacctctctgcggctattgagcagttattggctgatatcgaagccgggagaaaatatatgaaagtatataaacagatgaaaatgtataatgacccggcattgaatccggtgctttatgcaaaaaaataacgaatggcgcgtattctcattattcgtttttcagctcttggcgatgtagccatgacaataccggtaatacattcgctggctatgcaatacccgcagcacgaaataacagtgttaagtcgtgctgtatggcagccgctctttcaggggctgcctacgaatgtaggttttgtcggagctgacttaacaggcaaacacaaggggctttggggcttgaatagcctctattcggagttgaaagcgatgcattttgattacattgctgattttcatcatgtgcttcgttccaaatatttatgtctgcgattccgtcttgccaataaaccggtagcttccatatgtaagggaagggccggtaaaaagaaactggttcgtcgtcacgataaggtgatggagaatcagaagagttcttttcgccgttatgctgatgtgcttgagaagctcggtttgccggttttattaaatttctcttctatttatggcgaaggaaaaggcaactttgcagagatagagccagtcacaggacctaaggaagatcaaaaatggattggtatagccccttttgccaaacacagaggtaagatttatccgttagagttgcaagagcaggttatagcgcattttgcggctaacccacaagtgaaagtgtttctttttggaggtggtaaaagcgagcaggaagtgtttgacgcatggattgctaaatatccttctgttgtttcaatgatcggtaaactgaatatgcgtaccgagctgaatctgatgagccatttggatgtgatgctttcaatggattctgctaatatgcatttggcgtccttggtcaatattccggttgtttctatttggggggccactcatccttatgccggttttatgggctggaagcaattgccggttaataccgtgcaacttgatttgtcatgccgtccctgctctgtgtatggacagaagccttgttggcgtggtgattatgcctgtttaagagatataaagccggaacaggttattgcaaaaatagaagggattgtaggttgatattcgcaggaattcaatttagttgtttttgagccgaaagagcgtagaatcaaataatgatggaaaaagagatacaacgaaagaaaaaggtactgatagatcttacgaattatggtagtctaacagctggtttcggacagattgcggccaactatgcggccgctttttcgtctatgccgatagaggatcttcattttgtatatttgttgagacagaaatatatgcaggaatttggcccgaatgtgacttctgttccggtacgtcgtatcaataagttttttccttttacccttcctaaagtagatgtatggcatgcggtgaatcagcagcggaagttgttgcgtattgccggtggtacaaagtttatctttactatacatgactttaatttcttaacggagaaaaagccttggaaggctaaaatgtatcttcgtcggatgcagaataaggtcaataaggcagcagtagtcacaacgatttctcattatgtcgcagatgtcattcgtcaacatatagatttgaaggggaaagagatccgggtcatctataatggggtggagaggatcgatatgttggaaggaacccagccgtcttttgcgacgggacgtcctttcttttttacgattggacagatccgtaggaaaaagaatttccatctcctggttgacgtaatgcgccatttcccggaatatgatttgtatatttgtggagatgcccatttcgcttatgctgaagaagtgcgtaatctgattcgtgagaagcaagtcactaatgtgtttttgacagatgtaatcactcaaagtgaaaagatatggttgtatcggagctgtgaggcgttcctgtttcctagtgaaggagagggttttggactccctgtggtggaagctatgcagtttggaaaggctgtatttgcagctaatcgcactagtttaccggaagtttgtaatggacatgccatcatgtgggaacatttggatacagaatctatggtgcaaagtatccgggaacatttgcctgatttctataaagatgaggaacgcttgaccagaatgaaagaacatgcagcttcattcagttacgagaagcatatacaagcttatcttgatttatatcgcgagttagctcaattgtcttaatgtcgaagttaattgatcgtataccttttccggggtaattaatgcgaaacgttcttcataagttaatgttgcttgttgttccggcggaagaatatcgtcgggactaatacctcgggcaagtacggaatttgcaggtaaccacattgatttagaggcgcttggcgaataaatagcgaatgaaggaatttcgagggcttgcgcaatgtgtcgggctcctccttcgtttccgaaataaaacgagcagttggcgcaaagtgctgccagttgtcgtaatgaagaggcttgtatatcaatcttgatgcgttccggacatcccaattccttgtagatatttcttgcatcttcttcttcataccccggtgcatagttgaagatcatttgtatgtccttgtattcttccaatattcttttaagtgtggttatcataaactccgtattccattttttatggaggagcttggtggtgactcctattaggaatacagggcgcgcgaaatctatcccctccttttccatataatatcgaaagtcttttttctcctggtcagtgaggtataacctgaattcttttgtatattgaataggcttgattttctctaatggcgctgcaagcaataggttgcgttctaccatatcagttgttagactattgctgtaagtgtctgtccgataatttaatagaaaacgtgtgtatcccttgatacgccctatccggaaaggggtttttaatgaaaaaagagagaaaaaaagagtccggatcgtagaacgcatatcgatgatgacatcgtatttgttttgatgcgtcacttgccatactttttttatataagcagtgaatggtttattctcattcttgtcaaatgtaataaccttatctatgtccgggtgaccctcatagagcgatgctatatttttattcagcacaaagtgtatttctgcatcgggaaaactttttttcagcgtactgcacaatgcaacagccagaatagagtcccctatttgtctaaatcgaataatcagaatttttttgattggtttcatgcttgacttctttatgctttttatcgtgcaaacatagctaaaaaaaagcatttatgtctaaatataaatgaaaagaaaaaagaaaaaacgactaaagttgttctcaacagtacttatatgtatagagagttagccaatctttgtgagaaaagaaaaaaatatagtcggaatatgccttaatttctttatctttgctccatctttgtaattagtattatataggagagtgtaatgagagtgattgtaaatcccaagtacgcgcatctgcagaaggagatagaagaaattccaaggtccttccaggaaaaaggagatgtggtgtacgatgggcgtaatgttttaaaacgaattggcttaggcagcattgatgttgtggtgaagagctttaagaagcctcacatcatcaatcgtgttgtatattcgtttttccggcaatcaaaagcagagcgttcctatatttactctatggaaattcaacaacatggctttgacactccggagccagttgctatgatcgaacaattccaaagtggccttctttcacatagctattacatttgttgttatgatggtggcgaaacagtccgttccctgatggatgggaaagtggaaggaaatgaagataaactttctgcttttgcgcgctacacggctgctttgcatcaggcaggtatcctgcatttggactattcgcccggcaatatattgatccatcagaatgatgcggatgaatatagtttttccctggtcgacgtgaatcgcatgcagttgctatcggatattgattgtgatactgtgtgccgtaatatgtgtcgtttatgcatctctcgtgaagtgctgacttatataatgacagaatacgcttctttgagaggatgggatgtagaatctactgtcagtctggctcttcgttatagcgatcagttctttactcattatatttatcgtcgtgcggcgcgaaaagaacaagaaaggcatatcgtatccctgattttattcttccgtttgtaccgttctgtgcgtaagttcttttcttgggaaccgcatatctcacgtttcttattgaaaaaagaaaagcgcatttatgatacatacttgtgtaagtatgactattgcgaattgctttctgctgattatcaatgattaactcttacttccgcgcatgactacactgcggattttatgcctgaaaaaacctttctgattggtatatgtgcagttattcttatccaaaaatgcagaaatgactgcttcgtcatcatgtagatggtatgtgcaaattgcaaaatccaacttttggcaattctgaaataagttcttgcatccggccaatgcatgccgttcagctccttcgatatccatttttagaaacagatgctcatccgtttgattgttgaagaagtcatccagggtttgttctcttgaagagttatggtcgcttacatacttttggacaatcgtaactttatcttgccatggctcaaaggtcgctctgatggcctctagccattgttcgtcctgctcaaacaagtaaacatgtttggcttcatcgatgatttccaatgaagaatatccttcggcgcaaccaacatccacaaatacctttcctgtcacttctttaacgctgttgaagtaatggtgcggtgaacgcctgtcttgttccatgctcaaagccctgtaatatttttgaattttcctggccggagtgctctttctgaaatagagccgtttctcttctttttgaacatagtataaacctttctcctcgtctttctgtacgtcaacgggcatatttgcatattcatctttgaattcatacaggtgtcttgaatatccatgttctttaatatattcatagtatttcagataaggagagccgggcttatatcctttcatgaaataatatgggagagtgccatatataaatttctttattgtgtgtttaagtatgttcatctcattaatttcttgtagatgtttaagatctcttctgcttgcttttcttcagagaatcttttggcaaatatttgccctttttcaatcattactttctttctttcagggtcagagtatatctgtttgaaagcattggccattcctttgatatcgtcgggatgtatatagattgagtcgggacctccggcttcttccaggcaagaacctgttgcggctactaccggaattccggagtataaagcttctatgatggggatgccaaagccttcaaagcgtgaaggatatacaaaaatttcagctagttgataaaaagtcggcagatcatcaaaaggaacattgctgatgatgtgcactctttcttccagcttattctccttaataaaatgttcaatcttatcagtgtattctgtatggcggcctacaatgacaagatgaatttgttcaggaagcatcgtcagtgcttgtaccgccgaaagggcattctttcgttcttcaatacttcctacgttgaggatatagtgttccggtagctgatatttagctcggacttctctttttttctcttctgttacagggtgcgtgaatgaagtatcacatccctgataaacaacttctatcttatcggcaggaatcccgaaatactcaataatatcacgtttggtacattcgctgatagcaatgattctatccgcattttcgcaggctttgcggaatttgtatgtatatatattcctgtcgatcgaatgatagtattgtgggtatcgcagaaatatcaaatcgtggattgttacgatactttttaccttacttttatggatattcaggggtaattcattgctaagtccgtgaaaaatatcaattctttctttttccaattggcgggtgactcccaacactcgccataacgaacttaactttttccagaaagaagtagtggggtaagaaagctgtagttgccgatattgcttcgttaatttgttcagccttttattttcccgtttcttgggggcatacaatacatattcattctccggatagaattggcatagaatatccactatatagcggctataattacccaaaccggtgaaattctgtactgcacgttttccgtcaaaacctattctcatttctacttcttacctttatgtgattatagttagacttcaaattcccgataaggtttattcaggtctaaataatggaaattgtgttgtctttgcccactttgtttaggtatggtcatgtaatctccgtatttctgtgacagataggcatcatatttctgtactccccatacttcttcatcttcaaataagactggagtagggatgcccagaatatctttagacatgattcctttcattccgtcatcataatcacagaccaatgcggattggtcgaaatcatactttttcattactttcctgatactttcctgtgctccggtaagggtaaaaagctttctgcataatagcggtatccatgaactgggaccttttccatgcttgtatggatcgcgatgaatcagataaagtacacgtttgtagaattcgtactttgcaaaatgcattctttgcgccatgcggctctccggaactccgtccagtgggaatatatcaatatatacgcctcccaaatatttgagatgcatacgttcaattaaagtggtgttggcatcctgtacttttgcgaatggaagaggatattccttgtcgttttcagcacatacagcttcgtatggtttcggcaaccattctttggcattagccattaataaatcataatcggctcttggcatgccgatatccagatcatcatcccaagggataaatcctttgtggcggacggctcccagcatggtgcctgccatgatgtaatatcgcagattatgttctttgcaaactttgtcaacagctaataaattttttaatatgcgaagctgtagagggcggatatcgtaatttgccattttctatctgaatttgattaataaagactggctggaatcagcttctgtgcctgttgaaagtcctctacggtgtccagttcggccgagaagaactcggtggtatccatgacgtaaaagctatatccttgcggaatcagtcgttcaaaagcccgttcgtagaatatattgtccagtccttcagtggtaatcataatttccagttcccggaatagaactttggtgtattcagctgacattttttcgataccgatagactctccgatagcatcggatatagaacagactttgctgatttcaacaaccttttgtgcatcgtctacgataacttttatttcttccgctccaagctcatgacgattcagtgccaatatgtcgtccttatccgagtgaagcagtttttctacaatttgaggatcaaaaacaatgtcgctgtctaataacaatatttcttccccgtctgtatacggtcgggtaagccataatgaatagatattgttggttgattcatatctgtcattatagatgaaagtaatattttggactggataacgtgcctgcagaaaatcaacgatttgttgctggcgatatcccgtgacgataatgaattcgtcgaatccgttttgtatcagagcatcaaaagccctttccagtaggcatcgttttcctatcttaaggagacatttgggtgttgtatcggtcagcgggcgtaagcgtgatgctattcctgcggctaatattactgctttcatttggaggcgatttctttaattgtatctataacgattcggttttgctctggacgtcccaatgtgatacgcaaatgagtgttgatatccggttcattcataaacttcactttataactctgttcggcaaaagccttttgtaaagcctcttttagctctatcgggtatctgattaaaatgaaattggcaaccgattcatatactttgaatccgggtaacacgccgatttccttttcgtagcactcacggtcttcgttcatcagtttagcgatattgcggtagtgtgcgtccgatttaagagctgcaatggcgatatcttcggatattcggttgtatcccagatatttattgctgtatctgctgaatttttccagttctttactcataaatccgaatcccatacgtaggcctggtaatccataaaacttggataaagtacgggaaataatcaaattctgatatttattaaccagctttttgatataactggtatcagttgaaacaaaagaagcgtatgcctcgtctatcagtaccactgtttggctgggtacttctgcaagcagtttatccagttcttttggagttaaaccgttgccagtagggttattgggagaagccagtaaaagaatcttcggattctctttctgaatcatatctttcagcgtatcaaagtcatatttaaaggtgtttccgtcttcgtaaagaggatattgcaaagtatgaccattcacctcatctgcaattgacttataataccaccatgagaacttgggaatcaacatcgttttgtttccatcttcttgagtcaggaagtaatgaacggcttgcttcagaatatcttctccgccgtagcctagcaggacttgtgtttcatctatatcatataatttggataagaaaacagataatatacttttctttccttcatcataaatgcgggtataaaaacaaagtttatttatatcgaagttttttaaagcttctactacttcttttgatggactgtagttaaattcgtttcgatctaaaaagttcaaattcttttccatattagttttgtatgattcctttatcgcaccaggttagtttcctgactttcgtttcgttcaaaatactgcggttgttatttaaattatctgttccgtgtagttcatgatgaagatggaatacgattcccgcaaatttgatggtacgcttgcgtacaccactgttgataaggcggcatactaattcatgatcttcacttccccatccggttatagcttcattgtatccattgacttttaacaaatcctctttccagaaagccatattgcatcctctcgagtaagaaacatcccattgacgataatgttgaagtagtggactcaaccaaggtaaatgtactccgttgattgtgtttttagtacctttgtcgtgaatggaaatgatgcagtttttttctgctaacatttttctcgttaagccttcccggattaatacacggctaccagttacgaaactacctcttttggcaaaacgtacatgatctttgacgaaatctttgtgtaagacgatatctccgtcaatttgtataatatattctttagatgctttcgcaatagctttgttgcggatggaggccagtctgaagcctaaatcctcatgccaaacatgaataatgggaacttcagaggaagctgccaattgatgaattagctctcttgtatcttctttagaaccatcatcagcaatgataatttcatcaggaaggagagattgacgtagcacgcttttaacgcataattctaatgcgtcgcttctattataggtggatataattagcgatgtacttatgttgctcgccattggtttattcatataattattactaagttagttaaatagttaagggggcttgtactaaaattctacaaatgtatacattttatttggttgtgacaagcgttgagggcttttttgctaaacattagagggttagcgttctttttaagaataatatccctatctttgctattagtttgttataataaccaagataaatagtgtgtttgtaatggaaaatcatccggtggaagttagcgtaatcatccctaattataactatgctcgttttttacagcaacgtattgagtcggtattggcacaaacatatacagactatgaaattatattattggatgatgcttcaaccgatgatagtgtgtctattttaaaccattataaaacaaattctcgtgttactcatttggagattaattcagtcaatacagggagtccttttgctcaatggcaaaagggaataagtttgtctcgtggaaaatatatctggattgccgagagtgatgatgcggctgaatctttttttctagagaaagctgtttctgttttaaatcaatatcctcgtgcttccttctgttttttaggttcacactgtatagacgaaaaagggaatcaactatctactgattttgaccgctggacttcaaaacaattacgtcgtccttacaatataggtgtttttgatggtgaagattacataaaacataatctttattggcgtaattatatttacaatgctagcggcgttgtttttcgtaaacaatgttttgaacagatagaggatttatcttgcttctcaatgcgctatagtggtgattggcttttttggatagagatggcgaggcaagggagtgttattgagttatatgaaaagctaaacctttttcgattgcattcaacaagtacaactgttgagggtaacgcttcaggtaatgcaattcttgaagatattcaagtagtacattatgttgaatcattttcttatccaatagggtgttataagcgtttgatgcggcatggaatgctttataaaaatataaagcgtgctaaaattgatccgaaaatgaggttgttgttgtttgaaaaactgaaagggtgttttggcacaagtgtgtggacatatagatgggaacggtttaataaatacatgagttttttgaatccatggcaacctacaagagatagaaataggttgtaatgaattgtgaagtgcaataaagaaagatatggttgacaaaagaattatagcattttatttgccgcaatatcatccattttctgaaaatgatgaatggtggggcaagggatttactgaatggagaaatgtggtcaaggctagacctctttatcgtggccattatcagccacatttaccagcagacttaggtttttatgatctgcgtgttccggaagttcgtcagcagcaagctgatatggctcgaatgtacggaattaatggcttttgttattatcattattggtttaatggtcatcaattgatggaaagaccattagaagaagtgctgtcttctggcaatcctgattttccatttatgctttgttgggctaatgaaaattggacaagggcgtgggatggtggaagtcgtcatattttgattgctcaaaattactcggaagaggatgatcgtgcgcatatccgttatctgttagataatgtatttagtgattctcgatatataagagtagacggtaaacctgtgtttttaatttatcgttccatgctttttccgaatatgaaagagactattcgagtttggagggaagaagcttctagtaaaggagtggagttgtatttatgccgcgtcgagactatggattgttatggagaagaataccttcaggatggttttgatgctgccgtagagtttcaacctttcactcatcaaatgaatgagtttcaaaaaaaaagaaatccattacggaagtttgcttataatataaatcgtcacctttttaatacatgtaagaagaaaaagattgattactcggaatatgtagattatatttgtaaaactccttttcctgattataaaatgtatccgggggttactccaatgtgggataatacttctcgtcgaaagcaaaagatgtttattttggacaagagtactcccgaaaaatacggtgaatggttatgttcggttatgaataaatttgtgccttatagcaaagatgagaattttatttttgtcaatgcttggaatgaatgggcggaaggtaatcatttggaacctgacttaaaatggggattccgttatttagaagaaacagaaaaggtggtaaaaagtatgcaaaaaggtggcttttagatatagggaggtgtttgtatttttctagagtatataatgttgctcgtgttcgagccagagctagagaaatcttacaaaaagatttctctagatattaattcgtagaattctgtaccatataaatttgaaaaagatcttgtttttgcatttactattggtataggtgtggcgaaaattttgcacttcattaaaagcttgtttgagaggaactgaacttttaataatatgctttactcgtttatactcttttttttcttctttaaggtctaatgtcggggtctcttttccttttctataaaattcattccttgattgtatatagtatatgtcatgatttttaacaggaaatacgttgatcgttttattgtatatttctgtgtattcattgcccatatcttttaaggacttcatgttttttaaaagatgtcttattctttctactttctgtttatattcttgtggggctgattttatagttgaaatgagtttaaagatatcgtctaatgtactatttataggtaaaatccagccgacatctgctttttttactcgttcggcaattgcccctagatcaaatgagattacggggatctctgaaattaaactttctgataaggtataagaatatgtttcgggccacatagataataagcagattaattttatgtcattctctagcagtaagttgggaagatcttgttgtatatacttgccgtgataaacataatttttcttattcttattgcattttttgtttgttgtttgtccgaaaagatggacgtttatgtctgtgccttttactttctctgttaattcctctaaatattttagtcctttttcttctgttatatatccaataaaggcgatattaaactttttattcttctttttatctggattgtcattatttggctttccgtttattttgtcataaccatgttctaccacttcgattgttaaatccttatatgtgttcaggaatatgttttttgtactgtacgatggaacaatgatcttttttacggttttaagattttcataaaactcttttctccaaagtggaatgaagttgatattcaggttgaatgtttttgctatgcatgaaccacatcctgctgtgttagcatagttgcatagaaaagtttctttgttaaagagcttcacagaaggacatattgaataaaagtcatgtaaagtatatatgacagggatacttctttcttttgctactttgaatatgtccaaatacatgtgttttaaatgatggatatgtattaagtctatttttaaagtgtctattagtattttaatgtctctattaaatgtgtcattatagaggtttaatgtcgtatattgtgaatatgcacctagggtggaggtgattttgtcaaatggtaaaaaagaagttacatgatatttaaaatcatcatcggaataataaagaacatgaaaattaaattcttctttcatatttgttattaaatcatgtacatgtaaagttgttcctcctatatttttcttttcggcttctttgaaatcatgtattacgattaatacatttttcttaggatgtgaattaatggcatagcggatatttaactgtatatctgaaattggattttgttgtacaaaggactctgtgttttcaacacatgaaggatatctactttttaatatttgtaggtgagaatttattagctctgttttttcttgagaaaatgactgggttcctttatgatagatgtatgtgttgtcacatagtagatgtctatatccagcttgtagacatctgtacgaaaaatcattttcttcaccgtagccttttccaaaagttttttcgtcgaagagaccaatgttgtttatggcttctcgtttaatatacatacaaaatccatttgcagtaggaatttcagggaataggttcatgctgcatctttcaacaattcctgcatattcctctatcgtaaaatctgatggtatcgtattttctgacataaaatcaggtacggatgctaatgtcgcattgttagataatggagtaacagttgctattgcagctttgctatatgcgcacttttgtattttagggagccaatttttcgtgacctctgtgtcgctatttaataaaacaacatcgcgtgacgagtgttgcatcccgatattaaccgttcgtacaaatccttgattgctctcattgttgattattgtaatatttaaagatggatattctgttgtaaacaggtttagcaaaggaaggattcgctggtctgtacttttatcattgataagtagtaaggtatgtttagtaaggtctgtatgctcaatcacagtctctatacacttcttggtaaaatcaaaagcattatagattggtattataatatcagtatccatggtgaattaaaatagattgaggtgaagtaccactttatagaagtacagattgtttttatacataatgacacaaaggtataaagaaaaaataagagtggcaagttattaatctcagaggtatagattttaaggcaatatgtttttcgtctaacttaatactctgctatggcttttgatgttatttgggtatagggagcttccaaaatataaagtcaattgttcttgtataattgattgttaggtttgtctttattagaatcgagaatatcagaaattaaagtgatcttattaatgcagatctttcatctcatttacttatctttgcaaatgaaactattgaatagttagaaaaatgaaaaataaactggcgatcattatacctgcttataaagcttgtttttttcgggaggttttagattctattgtaaggcagagtaaccgtgattttacggtctatatcggtgatgatgccagtcctgatgatttagaatcaatagtatctgattataaggataaattagatatattctatttccgttttgaacaaaattggggtgggagagatttggttgcccattgggagcgctgtattgaattatctgatgagccgctggtatggcttttttcagatgatgatttaatgccaccagatgctgtagaacgggtaataaagggttggaagaagtctggagaatgcgatgctgtatttcgctttcctttggctatagtagatgcgtatggtgaactgaaatatactaatccaccttttgagacagaaaggatttctggttatgatttcttattagataagttaagtggtaaaatatcctctgctgcgtgtgagtatgtatttacacgtgatgtttggaagaaaacaggagggtttgttaggtttcctttggcatggtgttcagatgatgcgacatgggcaaagtttgcggattatgcatctggtattatttcattaccgggaactcctgtttattggcggaatgctgaagataagaatataagtaattctacacgttttgatggggagaagcttaaagctaccggactttttctaaaatggattggaatgaattatagattaaatctccgggagtctagatttcaagatgcgttggtgacttatgtgaatgtaatactagagtgttctgtaagaggaaattatagtctaaaagatttggtttgtttatatgctattatgagaaaattctctcctactgtggcttcacgtatcctacgttcccatattttgaaagccaaactttttatttgaatgaaatgaatttatctcctagttagaaagagatggttgaatattaattttattgaaatgcaaaatgaagaaaatactttttattataccttgtgttccttaccctttgaattctgggggaaatcaggctttctttcaaatggtagactatatccgtcataaaatgtcagtttctgtgttgttttatgcttggacgattgatgaggcaaaaagggtagaaaagttagaagatttgtgggaagatgtggatttttatacttttgttaaggagacaaaagaagaaccggactctcctttagtgcgaaatcctttttattataagtggctgaaaaagctcaagatgtctattgagcgtaaaatgcggaggcagttattatctacgtcaaacagtaccgttgatttgttgaaagataaagattttgtacgtgaaaagtctgttttacctaattctgtatataaagaatttgatacacggtatatagattatattacaaaagtagcacatacagggtttgatatcattcaggtagagttttatgaattgatagcattgggatatgtgttaccgcagaatgtacagacgattttcgttcatcatgaattgcgatatatacgtaacgagaatgagatgaacctttttcaggcaatacggcctagtgaccggatgaattttcttgttgcaaaagacttcgaatggaatgcgttgcagaagtataagcatataattgctttaacggaagtcgataggctattgttagctagctatttaggtcgcgaagatcatatttatgcttctcctgcagtggtaaaatttgaatcgaattcagagacggagtttatcccttgtgttcatcgacgttttacttttgtgggatatggagaacattttccaaatctagatgctgttgtatggctttgtaaggaaattgttccttatttacgtaaatgcaattttgagttcactttgcaagtggttggaatgggatatgaatgctattctgctgaattacgaacggcttgtcctgagatagagttagttggattcgttgagaatttgacctctttcttgcaggggagcattgctcttgttcccattcgtatcggaagtggtatgagaatgaaaatacttgatatggtttcttcaaatgttccttttattacaacttcaaaaggattggaaggtattcattttagtgacggcgtagattgcttgatagccgataatactgttgatttcgcagatgctatgattaaattatccaatgatttggagttacaaaaaatgttggttcatcaggctaatgacaaaatgaagaatatgtataatccacaagaaatgttggatcggagattatcggtttatacttctattcttaaagatgaattttaatgtttttgttgagcctttgattctatattgtcatcttgaaaatgttttagattctttacacattagctgctactattcattcttgaatgatatgaagtggcaaaaagatttaataaattgtttgaaagactttttatctttgggaatattggcattggctattatctgggataaactgtattgagatactagatattggtctgagctttttataaagccgttgaaatctttattgtcagagactgcatcataactctcattgtgttttctccataaagttatttcttggggaatgtaatagactttattgaacacacatatttgtctccaaagccagaaatccaaccatgcggggtaaggggtactaaaattaatattttgaattacttctttttttacgcaaacggcggagaatgtggggatatagtttgaatcaaggtagggaaatatgttactacctgaatgtcttttgaggaatgaagaactaaactctatatatgaatcatattcagggttatttgataggtttataactttgataccattgactatgaaatttgctaaaggattctgttgaatcgtatcttgtaaagattcaatatggttattggtccaataatcatcgctctcacagaatgcgatgtattctccattggatttttcaattcctaatttcacagtctcagctaatcctttgttctggttgccgggatgtgtgtatagttttatatttttaaaacggttggcatattcttctattataagaaggctttgatctctgcttccatcatccacaacaataacttcaaatgatttattggtttgtctgattaaagaatctaaagtctcttttatatatttagcatagttgtacgaagcaacgataactgatatcaatggttgtttcttcattattgttgtagaataatagttaaacataatagtatcagtaagacacaggatattcctaaagtgactaaatagtatttcttatatttctggtatttaagcttatacttgttgtatttagaaaagaaaaacgatggatctttatataaattgaaaacttcttgtaggtgattgtataaccatttgtcttcttttcttcccagataatcatagaattgagtaaaatagtatacatatcctgcatagccgccaggatttgcatcgaaaacgatacggaaaaaagaataatcagtaataaaaccagcttcattgagattgctgctaggcttcatgccatgaaaatggataagtttagctttgtcattgataccccaataaggtttccaattatattctattggtaatagttccatgtctttgaagcatagctcatttaaatatccttggtcaaaaagtccggatatgtttctttctctatttttcattttaagaataaattcctcatatttctctttcatgccttggatattcataactaatactcccgcattaaaatattccatatcttccacattgcgttcatattctggggcagctgctagataagtgggatgtggaagctcctcaagtaaaatgtcagcattgaaaatcacgtctatatcagaataaagaacatacttttcttctttttctacaacagggatttccattctcataaatgttccgaaaattcggttatattcgatttctttccctaaattctgcaacatccattcacgcggatatatctccatcaactcttgcttatagggcaattgatggaggattatttctacattgaattcctttaataagttataaacaaggtcatttgtgttgccatcatatagacaaactaaatggagagatgtgtttttcctagcactgattaacatgacttttagtaaatcaagataatcttttcgagtgactatggagtctgtcagacaaatatagcatttcataatctgatatttttattgcgttatttaatagagaacattatagatatatttttcactcttttttagccgagtttgtatttgtctgattttgttttgaccaatgggttagtgttttaatatgccccaaataatataattcttcttcagttggttttgcgctattcatataccaaggtaaatgtctgacggaataagggtgtccggttcgaatacagaaacagtctgggtcaataggctccccgataaaatagggcttatatacagcaaaggttgtatctattaaagctttgaatatgttaggctctatttcttctttccagaaaacgctttcccactctataactttttcttttaatttataatgatctggtaggtcgtctatgcagattgagaagccagcctttaatgctttgggatatttttgtagtaataaaatgaatttctcaataaaatcgtcaggacaattagggaggatctctaaatcagaatcggtataggcataataagaatccttgaattgtttaaatatccctgtttcccacaatgatagatgcccgacattcttatttaacatatatacagggtatggtagtcttgtatagtattctaatagtggagggtatgttgattggttatcaataatatataaattatgatatcccttattttctaagctatggattagctttgttagcatttccaaacggttgtaattgttaataatgatagggatgtctttatagttgattttctttactcccaaaaatcttcttttgatttcgggaataaaccatttaagaaatagctctttagacctttgaaagtcttgattgaatgctttatattttcgaatcaactttcttctcattttttatttctgttaacaatgatgttatacattatttttctggtttatagattacaaagctactattttttttgattaatattcgtcatttctaatattgtatatttaatattattatagtatgatgtttggatagaggtcggcattaaacttttttagatattcagagcgacggcttgagatgtttattatctttttcttttaagaaatctttctactaaaaataataatttaatatactgtcgtgcttttctttggatccaaacagtgtctataagttgttgaactcggtgttttgataatatgtctaatgcctgctcttgagttcttgtcttctcttgaagggcagtatgattctgataaaactcactaatcagatagggaaaatcatttttaaaaaaatcggaacgttcttgcatgattaagttaccgcttttagggtcagaacttattccataaatattaaagtatgagactgcaaaatttagatgttttgttgtgcgattaaacaaaaggatctgttttataaaaaaagcccaatctgatataatctggtatttttcttcatatagcatatttttaaagagttctcttttaataaaagtcgacggatgtcctaaagaataattatatataaaaggtagggtcaatttgtcgggataagggctgatttgtacatcatcagcattacgatacagatataaatcagcatagacaatatcttctgtgaaattttctttaaatactcgtgctagaatgtcattttctaaccaatcaccggaatttaaaaacaatagatagttgcctttagctttaataattcctttgttcattgcattatagatccctttatcaggttctgatacccaataagataaatgtgatgcatacttttttataatgttaatactattatcggttgaggctccatcaataataatatgttcaaaatccttaaaagattgctttttccatatactttctagagttttctctaaacccttagcgtcatttttattaattgtgattatggatagttgtgtcatattgtttaggttcatgtctattgttttggtttatgatgattgttgttggttgattgtatattagtgtgctataatcatgtgaaaattctgttttttgtgcctacaggagtctctaaggattttctctatgataattattcctgcatttctctgcaaaaatagtgatttatgcgtaataatgtatgttcagtgattggaaaaatgaataaagtttggataatttatgtgatatctatatatgtttaaaataaaaaagataaacaaaaaaagagaaataaaatctttttttcaattgtatagtctatctttgtacgaaagaatcctaaaccttttatttttatttacttatgggcatgtttgaaaatcgatcacttgtaagcagtggtagcctgaagcaattgttgctttttgtgttgtttttgttatctggactgatgttgttagttggatgtcatgaagatcaaaaggaagaagctgtatcttcaatttataaagaagataatctgagatatgaagatagtttaaaacgatatttgcgaaacacttatccctctgttataaataaagtgtctgtaacagaatcatttattgaaattatgggtaactgtgtgggtgaggggcatttttatttgggtgagattcctccttatttggatgtaacaaagctagacaggaccccatataaggtagagttgactgaagcatcatttagcatcgtattagatcgttttattgaaagggaaggtgttttatatgatcggttattgtcaaaatgggctattttccaaatggcagatttaacagaccaattggtgtctcatgcacgacgacatgcggatgaaatttgggcgtatcaacatttatctcctattacattgacttctaagaaaggattgggaggtcttactgcaaattcgtttatatcagatttaagtttgttgggtattagtagtgctacaattaatgtttgtataactcattttatgcatcttactcccaaagcaggagatatagaacatctgtatggaggaaaaacgtattatatggatgaagagtatctcaataatactttagacaaagtattattagaagcaacaaaaaaaaggaatatctctgttgcggcaattattttaattgatccagcttcacggagtgtagatacgggaattggagaattattacagcatccggattatagtgaaggaacttacacgatgcctaatatgacaactttggagtcggtaaattgttatgctgccgcacttgattttttagctaaacggtactgtagatcagataatcgctatggacgtatctctcattggattatgcataatgaggttgatggtgggctctcgtggacgaatatgggggtgaagcctgttactatcttttcggatacttatataaagtctatgtgtatgtgctataatattgtgcgtcagtatgatgaacatgcagaggtgttcgcttctttttcacattcgtggactgatatttctaatgtgggatggtatactagtaaagaaattgttgatttgttgaatacttatagtcggattgagggagacttccaatgggctatggcatatcatagttatgcgcaatcattatttaatccttgtacatggctcgacccggatgcaacttactctatggatacaaagtatataacattcaagaatttagaggtgttgaataaatgggctttgtctaaagaaaataagtataaagggactgttaagcgttctgtatggctttcagaggcaggtgtaaattctcctacatattcagatgaggattttcagaaacaggcagcaggttttgcttacgcatggaaaaagataaatgcattagaaggcatagacggaatacaatggcataattggttcgatcatccaggtgatggggcttgcttggggttgcgtaagtatctggatgaaacttataatggagaggcaaagccagtctggtatgtctatcaaaaagcaaacacagaggaagaggatgaatattttgaacagtttctatccgtaattgtgatttctgattggaatattattgaaaaattttaaattatctgcattattaactaaaactgaaattatgaaaatgttaagattttcttgtgttaaaaggctggaatacgttgtgaggcgttgtattatgccgtttttaataccatttttaattgtgaatgtgatttcttgtggtgatgattttgtggaagacactggaggaggttctatacctcctgaagagatcataattcctcctgtttatatgctattagatggtccatataaatcaggggtagttttaactcgaaatgaggatgatagttatattatagaaactattgatggagatccgtgggttacgggtggccgatttaaagaagacattccagaggaatgtaatgtgcttgagtttgaataccagacaatgctgggtataagtaatctagaactctttttcgcagatgctaaaactaatattgatgcttctcatagcatgagtgcaggggaagttccgagtgctgaaacatggaaatcttttagcgtgcgtttaaaacaatatcgtaaagattttgattggggggaaatgggtgattatttgcggatagatttgggtaatgttcctgataatacgatacaaatacgtaatatatgtctgcgtgtaatgaatgaggaggaaaggaaggaagaggaggaagaaaataatgaagttctcaataaggaaaaatatgagcaaaatataaaagattatctaaataaggattataattgccatgtgaccgatatcgccgtcggaaaggagacaattagtgtccgaggaaactatcagggggatggagttttctttttaggggaaataccaccttttgttgatatgtttaaagcagaaaagatagagtctatatataaaactgttttgtcacagaattcttttgaaattcatttggatcgttatgtggctattggtggttatcagtatgaccgtttgttatctaagtgggcgatatttaagggaggagtagaaaaagatgagcaagtatctcatgctcgttatgtgggggcagatggagtttatgtaaaacaaaaagttggagctatttcattaaaatctaaaaaaggattgggggggcttataaatcatgagtttcttgcatcagatttagatggattaggaatcagcagtgcaacaataaatattcctattaccaattttatgcacctttctcaacagtcgggagatattccatatgtgtatgggggagtaacttattattttaatgaggagtatcttagaagtgcatttgatgtggtattggaacaaactagccagcgcaatatttctgttgctggtattttgttggtttctcctgaaggagatgccggagaacttctgaaacatccggattttaatggcatagctccttatactatgcctaatatgactactatagagtctacacaatgttatgctgctgcacttgattttctggcacaaagatatagcaaacctggtatgcgtattgcgcattggattattcataatgaggtagatggaggtagccattggacgaatatgggggataaaccaattgctacatttatggatacgtatcttcgttcaatgcgtatgtgttataatattgtacatcaatatgaccagaattcagaggtctttatttctttctctcatggatggaatattgctgctgggggcggttggtataaggtaagagatatgcttgattttatgaatctgtttagtaaagcagaaggagacttcttttggtcattagcatgccatagttacccggctcaattggggaatccttgtacttgggatgatgctcaagctactttttctatggatacagaatatgtgacattgaagaaccttgaagtattggataaatgggttagtatcccacaaaaccaatataagggaggcatcaggcgttctgtgtggctttcagaggctggaacatgttctctaagttatgcggataaggatttgcagaatcaagctgcagggtttgcttttgggtggaagaagatcaatgccttggaaggtattaatggaatccaatggcatagttggttcgatcatctgggtgatggtgctcgtttaggattacgtaaatacaatgatgaggaatatcagggggaagctaaaccgatatggatgacttatcaaaaagctggtactgatacagaaaatgagtactttgagcaatatttgcagcggattggtattgatagttgggaaggtatcattcagaagattccataatgtttattattggggactatattgctagatattgtagtgtaagtagttggctatttctgttcttatttttttatatctctgatgttctcttataaattatgaggtttatatgggagcaaggatatgatagatatagagatattgctgaatgaaacctgcagcttttctaaaaaatgctagttttattcggcaatttactctatatttgtctgtataaccccaaaacaagaaatgatggatacactttataggtcataccggatgttgcttagcaacatatctactgattttatccgttatctccatgatgagatagagtggagtagtaggcttattgctattttaggttcacgtggtgttggcaaaacaactatgctcttgcaacatatcaagttgtatgataatattgacgagaccctgtttgtgacggctgatgatttatattttgcagaacataaactgtttgatctggcgatggacttctatcagcatggaggaaaaaaactctatattgacgaaatacataagtatgctggttgggctcgggagataaagaatatatatgatctgattcccaaactgcaagtcgtgtatactggttcctctatattggatttggaagtcggagaggctgatttgagtcgtagaaagctggaatatcgtatggtggggttgtctttccgtgaataccttgccatttcgtatggttatcatttaccagtttattctttagaagatatactgaaacataaagtagattttccttatgtcgaggcgcgtcctattttgttgtttaaggagtatctacaacatggctattaccctttctttcaggaaaagggatatttgcttcgtttacaaagtatcattaagcagactttggaaaatgatataccgacttttgcgaatatgaatatagcaacagcattgaaattgaaaagactgttgtatatcatagcgaaaagtgttccgtttaaacctaattttaccaagttggcgactttgcttgatatgaatagaaatacggtttctgatttgatgtgttatctggaaaaggctggaataattaatcagcttcgggcagagacggaaggtgtcagacttttaggcaaagtggacaaggtgtatctgaataatacgaatttggcttatgcgctttctgacaatacaccggatattggtaacgtgcgtgaaacatttttcttttctactttgcgagttgtttgtccggtaaccacatcagaagttgctgattttacggtgggtggttatacctttgaagtaggtggaaagaataagtcgcagaagcaggtgcatgatgtggagaatgcgtatgttgtgaaagatgatattgagtacggaatgcgtaatgtggttcctctctgggcatttggttttttatattgagataatatgtatatttgtacgatgtgaacttaaacagattgaaatatgagtggcaagatttaccctatcggtatacagaattttgaaaaaattcgtaaaggtggctatttttatatagataaaacagcattggtttatcaactggtgaaaaccggaagctactattttttgagtcgtccgcgccgttttggcaaaagtctgcttatttctacgcttgaagcttactttcaaggaaagcgggaactctttgaaggactggctatggagaagctggaaaaagattgggtaaaatatcctgtattacatcttgatcttaatacggaaaaatacgatactccggaaagtttggagaataaactgaatggggcgttggtggaatgggagaagatatatggcgaagagccctcggagaaatctttagcgatgcgttttgaggggattattaagcgtgcctgtcagcaagaggggcaaagtgtggtgatcctagtggatgagtatgataagccgatgctgcaggctattggtgatgatgttttgcaaaagagtttccgcaatacattgaaagccttctacggcgcattgaaaagtcaggacggctgtatcaagtttgctttgttgacgggagttaccaagtttggtaaagtcagtgtattcagtgatttgaataacctgaatgacatttcaatgtggaataagtatatagacatttgtggtgtgagcgaacaggaactatacgataatctggatgccgaacttcatgaatttgccaatgtgcagggagtgacgtatgaagagatatgtgtccggttgaaagaaatgtatgatggttatcatttcacgcacaattccaaaggaatgtacaatcccttcagtctgcttttggcttttgataggaatgagtttaaaagctactggtttgaaacaggtactcccacttatttggtggaattgctgaagaaacaccattacgaccttcatcggatggctcatgaagaaaccgatgaacaggtactgaacagtatagattctgaatctaccaatcctattccggtaatctatcagagcgggtaccttaccattaaagggtatgatgagcgttttggaatatatcgtttaggttttcctaatcgtgaagtggaagaagggtttgtccgttttctgcttccttattatgcgaacgtagataaagtggaatctccctttgaaattcagaaatttgttcgtgaagtggaggctggtgattacgaatcttttttccgtcgtctgcaaagtttcttttctgatattccatacgagcttgcccgcgaactggagttacattatcagaatgtactttatattgtatgtaaactggtcggtttttatgtaaaagcggaatatcatacgagtgaaggccgtgtggatatggtattgcaaactgataagttcatttacatcatggaatttaaactgaatggaacggcagaagaagctttgcagcagatagaggataaacattatgcccgaccatttgaaacggattcacgaaaactttttaagattggtgtgaatttcagtgctcaaacaagaaatatagagaagtggttggtcgaaaattgaactgcctgcgccggaaataagatattcatttctcatattctcatagatttgatttaaatagcagataattaataaagtaagctatgagaaatacttttaaaattggtatttctcatagttttattcgcaaatagaccttgatttggcttatttctcatacctgttgaactcatttctcataatgtcccggtgttggtatataaataggctgtgtgggcttacctatattctgtaagttgccttttgcttttagacgacggatttgcctactggccatactttgagtgaaactgcagagcgactgcatattactacgggttaatacaggatgagttgcaaaataggcagtaagtttcttgtcgatctcttcttctgaaagagaagccgaatgtggcttgtattttgaacgtcgtagatgagtgctcatgcacaaaccttttaaatctctatcagcttggaagttaatggacttaagtttcactttgtcagcacgagtggtaagcgagtgcacgggctcggtagcttgcaatgtaatctggaaatagccgattccatccagatgtactcgttctccctcgcacagatggttgcccatgcatctgctcaattccattaacatggcttctacctctgctttcccgaaagtagttgccatgtggatttctcttgccagcttttgagtggtcacatgttgaaaattaaccacccgtgggtggtaactaggttcttccccttctttttccggttggggattcttataaaactcgaattgtattgccatctttgttttaatttaatggttatttatatgttatgtactgatgctcttagtgtatcttgcttttattcttttattattcaaccgccatcctgattgttccactacagtgaacggttcttttcactctagtagacagaactttttactgtagtgaacaggcctgtgcactccagtggaacgattgggatgctctttcaaagatacgacattattaggtgaaaaacaagtaattaactagttgttttcatgaaagaaatagctagctgttttctaagataagcttggcggataaacaggagaatagttgtgtctgactatgagaaataccctgatagagtatgagaaatagcggctttttgaagaaaatcgatgaggatagtatgagaaacacctgttttaaaaacgtttctcataatgtacttctttgattatatgtgctttatctgaaatctatgagaacatgagaaatagaattgaaaaatctttggttcttaatcaaattccgtgctacttatttatgttcaataaccttattcatggctattccggggtactttaagatgcatatagcttggataatttatttgctatttctaatatgccgatatccctttatccatcaacctttcaatgagctttactagcacggaatttgaagaagaaccaaatcttttctagtagaaagatgaaataagtattctctgaaaagttgtttgtgtggaatatttacagtatatttgtgtcgtaataatcgccctacaaaacacatgcaggacaaataaataaagtaatgagaataacactggtaagagacgatggcaaggtgaacactatgcgtacgttgagaattgaacagctcgtggagcaaatgaaagtggaaactaaaacacagcctgtctcaaaaatgagagaagtcctgccttttatgcttccgggtgataaaaatgactatgtacagaaagtgccgaagctgatacctgcagccgccttttttcgcaaaggcggcataacgacgatgagtgaatacaacggaattgtgatgattcaggtcaacaacttgtccggacgtatggaagcggatgaagtgaaagaacgggtaaaggagcttccgcagacttacttagctttcaccggttcttccggaaagtctgtgaaagtatgggtacgctttacttatcccaatgatcgtttgccgacaactagtgaagaagcggagctttttcatgcgcatgcctatcggttggcagtgaaattttatcagccacaacttccttatgatatcgagctgaaagtaccttcgttggagcaatattgtcgtttaacttttgacccgcacttgtattttaatcccgaagcaatgcctatttatatgaagcagcctgccgctatgccgggtgaggtgacttatcgcgaacgggtgcaaacggaaacttcaccgttgcaacggcttgcaccgggatatgaaaagtgtaatgcgctttctgtccttttcgaagctgcttttgcacgtgcgttggatgaagagactgattatcaaccggaaggagacaaacaatcgctgttgattaacctcgcaggacattgtttccgtgccggtattcctgaggaagatacagtacgctggtctcgtgcccattatcgtttgccaaaggacgatacattggttcggggaaccgtacgaaatgtataccgcacttgtgagggatttgcgagtaagagtagcctgttgccggaacaattatttgtcatgcagatggatgagtttatgaaacggcgttatgattttcgtttcaaccagttgacatcacaagtggaatgtcgcgaacggaacagttttaatttttattttcatccggtggataaacggttgatggcaagtattgcaatgaatgcacattatgaagggcttaagctgtgggataaagacgtggtacgttacctgaattcggatcatgtgccggtttatcagcctatcgaggaattcctttatgaccttcctcattgggatggtaaggatcatattggcgatcttgccaaacgagttccttgtgatcatcctcattgggcgcaattgtttcgtcgttggtttcttagtatgatagcgcattggcgtggaatgggaaagaatcatgcaaatagcacttctcctatattgataggcccacaggcttatcgtaagtctacattttgccggttgattttgcctccatgcttgcaggcttattatacggatagcattgatttcagtaggaaacgggatgctgagctatatttgaatcgttttttactgattaatatggatgagttcgatcagattggcatcaatcagcagtctttcctcaagcatattctgcaaaagcctgttgtcaacacacgacgtccgaatgcttcggctgtggaggaactccgtcggtatgcctcttttataggaacgagtaatcataaagatttgctgacagatacttccggcagtcgccgttttatcggtgttgaggtgactggagtgattgatgtggtccgccctattgattatgagcaattgtatgcgcaggcaatggcactgctgcgtagtaatgaacgctactggtttgatgagaaggaagaggctattatgacggaggcgaaccgggagtttgagcagtcgccggcaatcgagcagttgttccaggtgtattaccgggtagcggaagaggaagaagagggagaatggttacttgctgcagatatacttcagcggatacaaaaggcaagtaaaatgaagatttcttccggacaggttaattatttcgggcgtattttgcagaagctgggagtaaagtcattcaggaaaacacgcggagtttattatcatgtggtggctgttgggcaagggtgatgatgaaataatgcacgagatgtgcattttattattttataataattatctttgcgtaataacgtgagatatacgaagactatgataagaaatccttttataacaagtggatatgtgtctgctgattatttttgtgaccgtcagcaagaaagcgaacagttggtacgcgaagtgatgaatgggaataatctggctcttgtctctacccgacgaatgggaaagacggggctgatccgtcattgttttcagtttcctgaaattaagcagggctattacaccttctttattgatatatatgatagccggtcattgcgcgacttggtatttgcacttagtaaagagattttggaagtactgaaacctgtggggaagaaagctttgcatggtttttgggaatgtgtgaaatctttgcaggccagtatctcttttgatgtgaatggtatgccttctttgaatttgggattaggagatatacaagctccggctactacgctcgatgaaatcttccggtatttagagcaagcggataagccttgtttgattgccattgatgaatttcagcagattaccgggtatgcagagaaaaatgtagaggctactctccggacttatgtgcagcattgtaataatgcgcgtttcatttttgccgggagccagcgacatgtgatggggaatatgtttttgacgccttccagacctttttatcaaagtgtgtcaatgatgcatttggaacgtattcctttagaagaatacgttcgttttgcatgtatgcatttcaaacgtgcaggcaaagaaatggaagaaagtgctgttaccacagtttatcaacagtttgaaggaatcacatggtatatacaaaaagtattgaatacactttatgatatgaccccggagcacggagtctgtaaagtggaaatggtgtcagaggctattcggcagattattgattcatttagatatacttattcggaaattctttttcgtttgccggagaaacaaaaggaactgctaattgctatcactaaagaaggaagggctaaagctctcacttccggcacttttattaaaaaatacaaactggcttctgctagttcagttcaggcagcactaaaagggttgctggaaaaggattttgtgactcaggaaatgggtatttgtcaaatatatgatcgtttcttgggtatttggctgaaagagaattattaagtcatatttcatttattgaagagggcttttcgataaatcgcgttaataattaatagaaactgctgcctgttaatctgttttattgtatctttgcggtcttaacttttttaatggtaaataatgaaggaatttctacaactaatgcgacgttttgtgtcgccttataagaagtatatcggctgggctattttgctgaatattttgtctgctgtattcaatgtgttctcatttacttttttgattcctatcttgagtattctgtttaaaacagaaggagcagataaggtgtaccattttatggaatggggtagtggcgatttagcagatgttgccaagaataacttctattattacatctctcagatgattgtggataatggtcccactgtagctcttattttcttgggactattcctgatggtgatgacattgtttaaaaccggttgttactttgcttcttcagccgtgatgattccattacgtacaggagtggtacgtgatattcgtattatggtgtatgctaaggtaatgcgtctgccgatgtctttcttttcggaagaaagaaagggagatattatagctcgtatgagtggtgatgtgggggaagtggaaaattccattaccagttcattggatatgttgatgaaaagcccgattctgattattatatattttgtgacattggttacggttagttggcagttgactctttttactatcattgtattaccgggaatgggttggttgatgggagtcgtcggaagaaaactgaaacgtcaatcactggaagcacaggctaagtggagtgatacgatgtcacaattagaagaaacactgggaggcttgcgcatcatcaaggcttttattgcggaagataaaatgattaaccgcttcaccaaatgtagcaacgagctccgggatgcgacaaacaaggttgctatacgtcaggctatggctcatccgatgagtgagttcttaggaacgattctgattgtagctgtattgtggtttgggggtacattgattttggggaagaatgcaactatcgatgctcccacattcatcttctatatggttatcttatatagtgtaatcaatccattgaaagactttgctaaagcgggatacaacattccgaaagggttggcttccatggaacgtgtggacaaaatcctgaaggcagagaataagattaaggaaattccgaatccgaaaccgttgaaaggtttgaatgatagaatcgaatttaaagatatctctttcagctatgatggtaaaagagaggtgttgaagcatgtaaacctgacagttcccaaaggaaaaacaattgcactggttgggcaatcgggatccggtaaatctacattagtcgatttgttgccgcgttatcacgatgtacaggaaggtgatattaccattgacggaacgagtattcgtgatgtacgtattgcggatttgcgcagtttgattggtaatgtaaaccaggaggctattctgtttaatgatacattcttcaataacattgcttttggcgtggagaatgcgacaatggaacaagttatagaggcggcgaagattgccaatgcgcatgatttcattatggagaaaccggaaggatataatatgaatatcggcgaccgtggtggaaaattgtccggtggccagcgccagcgtatcagtatcgcgcgtgctattctgaaaaatcctccgattctgattcttgatgaggctacttctgctttggataccgaatcagaacgtcttgtgcaggaagcattggaacgtttgatgaaaacacgtacgacgatagctattgcccaccgtctttctacgattaagaatgcagatgaaatctgtgtactgtatgagggtgagattgtggaacgtggtaagcatgaagaactcatagagttaaacggttactataaacgtctgcatgatatgcagcagttgtaattcttgatattgtaatgatattattaagttttgatacagaagaatttgatgtacctcgtgagcatggtgtagactttccgttggatgaagcaatgaaagtgtcagtctatggtacaaatcggatactggactgcctgaaaaacaacggggtgaaagctactttcttttgtacaagcaattttgcagaaaatgcgccggaagtgatgcggcgcattatggacgaaggacatgaagttgctgcgcatggatgtgaccattggcagccacaggcttcggatgtcagtcgttcaaaagaaattctggaacgtcttaccggcaggacgatacaaggttatcgccagccgcgtatgttccccgtatcagatacggaacttgaacggatggggtatgtatataactcctcattgaatcccgcatttatccccggaagatatatgcatttgtcggagccccgtacctgctttatgacgggtaagttacttcaaatcccggcttctgtaactccgtggattcgcttcccgctattctggttgtcttgtcataatctgccgatgtggctgtatcaactcctggtaaaccgggtattgaagcatgacggatattttgtgacttatttccacccgtgggaattctacccgttgggtgaacatcctgaatttaagatgccttttattatccgcaatcattccggtaaaggaatggaggaacgtttggatgtgcttatccgcaaactgaaagaaaaaggatatgcttttatgacttactcggaatttgcacagataaaactggctgaactaaataaaccggacgaaaaatgataaaattggctattgtatccccctgctataatgaggaggaagtgttggaagattcggccgcccgtttgacagccttgtttgatgagttggtggcgaaagaaaagatcagtgccgacagctttgtgctctttgtgaatgatggcagcaaagatcgtacatggagcatcattaagaaactgcacgggacgaatccttatataaaaggaatgaatctggcacggaacgtgggacatcagtatgcgatcatggccggtatgatgaccgctaaagactggagtgatgccgttattaccattgatgccgatttgcaggatgatctgaatgcgattgaggagatgatcgatgcttatacgcaaggatatgatgttgtatatggagtgaaagtatctcgtcaggcagaccccgtattgaaacgtctttctgcaacagccttttataaattacagcaccggatgggagtggagactatctacaatcatgcggattttcgttttctaagccggagagtgctggaacagttgtctcattatcaggaacgcaatgtctatctgcgtggtattatcccgttgctgggtttcccttctactacggtagatgatgtgattcgggaacggacagccggaacttccaaatatacagtgagaaagatgttcagtctggctttggacgggataacctctttctcggtaaagcccatttacggaattgtttatctgggaggtatctttgtttttatcagtattttgattggaatctatgttctttacgcattgatttcgggtactgcggaacatggctgggcctctttgatgttgtctatctggtttgttggcggggttgttttattatccataggagctgtcggactgtatattggcaagatttataaagaggtaaaacgtcgtccgctctataatgtggaagaagtgttgtacgatgatcagaataagtaaggctatacttgagaagcacccggattggcgggataagttctggcagtttgttcgttttggagttgtcggcactatatcttcagccattcactacggcgtatattgcctggtcttgttggttgcgaatgccaatatctcctttacggccggctatgctgtaggatttgtctgcaactacttcctgactactttcttcacctttcgttccaaaccatcctcgcataatgcgatcggctttggttttagtcatctgattaattacctgcttgagatcggcttactgaatctcttcctctggataggggcgggtgaactgcttgcaccgatactggtaatgattatcgtggtgcctatcaatttcctgattcttcatttcgtttatatctataaagggaggaaataacactattcaatccctttcatttaattcataaaaagaaaaggctattatgaaacgttttctaaatcttgttgtatatattcttaccatacatgtttcggctttactgatcgcaggactgtttcgcctggtgctttttatctcatcttatcatcagttgacctctgaagccttgtcggataagacacttccgatgcttgcttttgtgcatggtgtctggtttgacaatgtgataggctgttacatccttctgttgcctctggtggttgcggtagtgtgtggagtttgcaactattatgggaaagcgttgtttcgtttctttacgatctttttcagtgtcttttatggattggtttatttaatcagtgcgtcggacattccttattttgcctatttctttaaacatatcaactcttccatattcgaatggttcggttatgcgggaactaccgccggaatgatattgggggaaagtgcctattatctgtccatcggattattccttctctttctggccggattcgtagtttggcttatctatctggcacgttatttccatcatcgtagccttaccatttccgctccgtttccttattggaagcgaggaggggcggttctgatcggtgcttgcttaatcggactctgcatctttggaatccgggggcgtacaggctataacccgatcaaagtaagtgcggcatatttctgtcaggatgcttttctcaatcaactgggagtaagtcctacttttaacctgctgacgagtgtgatggatgatatgaggcctgaaaataaatacttgcatctgatggatgaacaggaagccatcaccaaggcgcaagctctgctcaaccgtccgggagatgcgaatgtttccccgttggctgtttacaggcgtgctgcaaaagcggatagcgtgcaacaacgccgtcctaatgtcgtcttgattatgatggagtctatgtccgccaagtttatgaagcatttcgggcaatcggagactttgactcctttcctggatagcctgtatacccgttctatcagtttccgcaatttctattcggcaggaatccatacgaaccatggtttgtatgccaccttgtattcttttccggctatgatgaaacggaacctgatgaaaggctctgtcattccccgctattcgggactgcctaccgtactgaaagaaaacggctattacaaccttttctttatgacgcatgaagggcagtatgataatatgaacgctttcttccggacgaacggctatgatgaagtgttttcacaagaagactatccggctgataaggttgtgaatagctttggagtgcaggatgatttcttgtatgactatgcaattccggtattgaatcagcgggctgccaccggacaaccgttttttgctactttactgtccatcagtaatcatccgccgtatgtgatacctcctttcttccatccgaaaacaagtgaaccggagatgcagatcgttgagtatgcggattgggctttgcgtcagttctttgaagaggcgcgtaaacaaccctggtttgataatacgatattcgtattggaaggagatcatggcaaactggtgggagacgccgaatgtgaactaccggaatcttataatcatattccactgatgatttactccagccgtattcagccggaagagaaaacagcatttggcggtcaggtagatatacagccaacgatattagggttgttgaatattgattatttacagaataattttggagtggacttgctgaaggaagaacgtccctgtatgttctatactgctgacaatatggtggcgggacgcaatgatacgttactctatctttataattacgagactcagcaggaacttacttatcatatcggtaacggcaaattgaatgctgttccgatggatgatagctttttgcctttgaaagaatatagtttttccatgctccaatcggcggagttccttgtgaagcatggaaaaacgcttaattctataccttttactcaacaataggagtcgtttcggtattttcaggctgttggtttttaacgaacttgtatatcttggctatttgccggagtactcgtttaggggattcatatacctcctcaaactgatacccttctttctcgaattcgggaagatatttctctgcatcattcgtgccgattaacaagaaaccttccgaaggacgtttctcatagaagttgtcgagacgattgtgcagatagaaattgagttcgaaataatgtacggggtcacctgctgcatgcagactttcttcaatgaattcgtacatcgttccttcgctttccggcgcaaccttttctatttctgtagcgatgaatttgaccgacttcgaatttaatgctgccggctgataagcaccgtccaatgcaaggtataatcccattgtaagcacaacgagagcgtataggaaacggttgttcaatgcatttttccgttgatagaaccaccagtagataccgagaatggtaggaatggcaatcaggaataaggcccctgctccgctgatattctgtattgcacgcatgaaattaatattgtcctgcgcgtgacgaccctggaaaatagtttcagggatgagtccgcattttaatacgatgaagcaggtgaacagtagcaggctgattactgcaagaatacttccgtataccttgatgactttagattgcttcttgaccagatagaatagatatttggcaaggaaataagcaatgaaaggatagatcggcatcagatatacactacgtttgctctgcggaatacagtagaagacgaagattacaacgatactggtgaaagagaataaatccaccgggtccatattctttatccacgtggtgaagcgtttccaccaggctgccggttggatgctgaatttatggtaagtcaggctgaacagggagagcacgactaacagtgtccagggaacgtatccggcaaatagggtcacaaaattataatgccaggggttcacgcatgaattgtaactcatggtattagtcatacgaccgaagttttcttccataactaatgccaggaactcttctccaccttgttggtaagcagcgacataccagcagaaaggcaggatgagtgaaagaatggcccaggcggaaagtaacaagaatgctttgaagaagttgacaccccggagtaacaagaagatgcctaccactaaacatggaatgatagtacctaccggtcctttagtcagtgtgccgcagctcatcaggagaatggccagccagggaatacctttgagtcccttctcataccatttgtagagacaatacagagcgccaacggtgagcgctgtcaataccatatccacccggcagtttgctccggcccggtgcagttcaaaattagtcagggtaataaaggcggctaacagcgccaattccactccttttcttttggcaaagaacagaaaaccgcagagagtcatggcgatcagggcgatggcagacggcaagcgggaggtcatttctgtgacttgccctccgtttactgctgccgaaacagcggctatgctccagtggaagaaaggcggtttgtaagccatttctcctccgttgtttctgggtaaaatccagtttccgctatccagcatggagtaggagacaatagattcgcgaggctcccctttggtgtggtactccgataaaccgaggaaaggcaggatagtaactacgcaaatgactagtaacagccagaaagctttgcttgaagtcaatgttttcatctttttcttatattgaaatttatgttcttttattttctgccgaagtcggccggaatttctccccattctttggtttcccatttcaggatacgggtggtataggtgtttccctgcaaccatttttctgcccgttcaatcaacaggaagagttcttctgtttccggggttcgggggagtttggtcttgcacttcttctgtcgcacccagctgatggcattcgcgctgtcactgtaaatgggcatatcgaaacctttctttttcagcaacgccaacccgtgtacgatggctagaaactcgccgatattattcgtgcctttcatcgggccgaaatgaaaaatctcctgacggctggcaatgtgtacgccgcgatattccatcggtcccggattaccgctacaggctgcatcgacagccaggctattgtcgatcacacaagaaggtaaagtatccgaagaaggtttaggacctcctgatttagcctttgcattcttgccgatataagcatagggagacattgtcaacgcgcgttccgcttcttcgcgcgtatcaaatgatttgtatttggcagcttcatatcctttgatttgaagttggcagtctgtccaggaagtataaactccgggggtgacaccttcccatactacataaaatttctgtttagccattttttctgacgataattttagatagtcaatgaattgacgctgcgaaggtacaaatatattctctaactgaacaagttagggggctacttgttataaaaaaaagagagttttaagaatagaaagtgcatataaaaagtgtttgagagaagaatgaggaaagtttactggttatcagttactttcctcattttggttaaaagtggcgaggacagacgaagacgggaatacgacaagatgagacagaggaacgttacctatccgtaacctataccccaaatggtgaatgttgaggttcggaagaatgaggaaggttacgaattgaatttgaacgctctgatttatagtgagttactgatgagcaacgtaagttttttggttacgaaccaattttgccgtgttctgccgtgaaatgcgtagcaagaaaagactcttcatgtattaattttgaacgcaaaaaagaatgacgttatgaagagtacattttcaattatcttctacctcaaaagacaggtagtaaagaaagatggtactgttccagttatgggacgtatcacagtggacggaacacaggcgcagttcagttgcaagacaactgccaatccaaatttgtgggacaccaagggcggacgtatgataggtaagagtatgcaggctttggaagtaaaccgcaaattggacaagatgcgtgtgagtatcagtaagcattatcaggagattatggacagggacaacttcgttactgccgacaaggtgaagaatgcctttcttggtttagagtatcgttgccatacactgatgaaagtctatttccaaagccgtgatgaaatggaaaagcaatataaggctggcataaagtctttgagctcattcacaagatacagaataggatgtgcctatgtcggtgagttcttgcaatcgcattatcatgtcaaggatattgctttgaaagagttgtctctgccttttatcacggactacgagacttttctcagaaccgaaaagcacttgaagataaactctgcgatggtgtttgtccgcaatctccgtgcaatggtattccgcgccatagataatgagtggcttgtaaaagaccctttcagacgatatgagtacaaggaagaagagacgacaagggagttcttgacaaaagaagagattcgcttgctcatggaaataccaatcacccgaaagaagatgagcatggtacgtgatttgtttctgttctgttgtttcactggtcttgccttcatagatctttataacctgaaggaagagaacatcaaaacgttctttgacgatggcgagtggataataatccatcgacagaagacgggaactgaagccgacatcaagttgcttgactatcccaagcagattatggaaaaataccgtggattatgtgaagacggtagggtatttccagtacccaactacaaaagttgtatggattcgctcaaaagactgggcaagaaatgtggtatcaccaagccgctgtcctggcacatgagccgtcattcgttcgcaacctcggtttgcctctccaacggagtcccaatagaaaccgtgagttcaatgcttggtcacaaggacataaagacaacccaggtgtatgccaaaattaccaaggagaaattgagcaaagacgtggaaaagttgtctcagcagattaataacattgaggaattcacgtttggaaatgtttgcaacgataatactaacactataaatggcagagtatgaaacgacaagtgataacaatacaagaagatatggtcatctacgccccacatcatggtgaggtgtggatgacagtttgggagattgccgaactgttgaatgtaacagggacagcagtgaagaataccatcaagcgcatttggaaacaaagtgtgctgaaagacttccagcattctcaatacatcaaacttgaaaatggatattctgcgcatgtctatgatatggaagtgattatcgccatagcacttcaaatggatacataccaagccttgttgttcagacaatggtttatcagtaaggtagtgaaccgcaaggattgccaagcagagcaagtaaaacacgagtatccgatgattattgtgatgaacggaacgatgccaagagatgctagttagaatctttcatctttttaataagatttaatagcgtacagagagaacgatttttgtcgttgtacactgtacgctatttttgtttcgcaatcttactgattgtttgtaatgttctgataatcaatgctaatccgaattacaaaatggcaaaagaaacaaattaggaacaacaaaatcccgtaaccccaaaatgaaattatgagaaaacaaaaattaacacggataacgcggaatttttccaattttgatattcataaatcaactccaaaagaagaaaattataagtaggcacatctgttttcattttaatagaatatagtggtatgcaagatgaagatgggacgagtcactgtaaatcatgcaaaaattagcaaaatttctaattaggcaaattatttgccgatttttataatgattttcggataaacaaacgatatttggaggaaaatgagtatctttgcaaccgaaaacaataataatatacgcaatggctgagaaaaatcttaatcgtataaaagttatgcttgcagaaaaggggaaaacgaacaaatggcttgcagagaaacttggcagagaccaagcaaccatttccaaatggtgtactaatgcttgtcaacctcctttagaagcattaatacagatatctcaatgtctggaagttgatataaaagaactcattagggttcctgaacataatccttataaagaattgtaatgaaaaaaataaatacttcattctcattatttgatttcaataagaaacgtgtgacttagagcaatttgatgcaagatcttaggtgagtcggtcttgacattttaactcaagcagcgagcactcagtgatattcatttctgttttttatcccaactggcttataattcggaaatttatcaaaatttgtatcaaaactaaataagcataacaatggaaccatctatatacagtttttcactttgtaccgcactgccgttaatgttattcttcggcttttattttttgtttgcaaagactcctgaaaagaaaattttcaagaattatctccgctcccgacagattatgggtatagctatgttgctgctttcagcaaactattcggtacatttcttctttggtatccgattcaaaaatgcggattctgccatattgatgaacatgtccacatactttctgtgctattctctgttcagttcggcattgataatgttgcttgatcgtttttacattaccaaacggcgtgtgtggacacatatcattttatggattatattttcaactctttccggagttgtgttgttcctgttgccaagcggaatcatgcaaaaattctctttatttgctttagctgcctggttagtcgtttttggagtcgttttagctcgcagagtcataattgcatatcgtagagccattcggattttcaatgaaactcaggcggatgatataggcgcatatatcgaatggctttccatattcacttattgggcacttatcttcggtgtcggatgcggattgctgacatttctgccagacgaatatgtttttatctggattttgtcgtcaataccgttctacagctatcttttctacagctatcagaactacctgctgttctatgaacaggtagaaaaagcgtttgagcaggatatacaatctgaagaagaacttctgacaaattcggaaactgaacatgaaatagtttttgagaaagaagttcctaggtcctatacagaatttatagagagggttgacaactggataaagacagacggctatgtccagcagggacttaccataaaagaactgtccgaaatattttatacgaaccgtacctatctttccgcttatatcaagactacgtataaaatgacattccgcgaatggataaccagtctccggttggagtatgcgaaaaacatactgaaggagcatccagaaatcaatatacagaagctggctgagtcttctggttttctttcccaaagtaactttatcaaattattttccgagaaagaaggatgtacgcctgccaaatggaaaaaatcaaatcgggaataaattgtgtagtaaaaaaacatcggaaaaggtcacagaaacccatttccaaaaagtgctcaaacgacaaaaaagtgctaattcgacaattcaaaaagtgctaattcgacaaaaagatgctcaaacgacattatttataaaattttacagcaaaagtttttctaatcttttgggcatagaatgacatttattatctttggagaggacaaagataataaatgcaagtttatatgagcagaaaaatcacttttcttaccttgtttctgtggctgatgacggtaacttttcctgtcattgcgcagcagaaaacagacacgacctacaccttccgcttcgttccgcagaaggacatgttctacgttccttggaatggcaatgacactgaacttgcccgcctgttggaatgtatcgaaaacagtaaagcaacaatttttgacggcaagttgccgctactggttgacggctactgcaattcgctgggcggtgaagctgagaaccttgcaacggcgaagattcgtgccaatcgagtaaaatcagaactgattacacgcgcgaaaatcaaggaagaaaacttcattacccacaatcatgcgacagggggtgattttgtaatcgtgcgcctaacggtacccgcaaaggaaacagccgcgatggatgcggaagcggaagcacgacgcaaggcggaagccgaacgcttagaaaccgagaagcgtgccgaacaggaacggcgtgccgaagagcagcgcaaggcggaagaagcccgacttgccgctgaaaaggcagaagccgagaaagctgctctacaaaatacacttgccggcacgccgtcggaaactaaaatcacaaatgattatcatctctccctgcgtgccaacctattgcgctgggctaccctgacacccgatttaggacttgaatggcgcatctgcccatcgtggggcattgccgtaaacggctcgtggacttcttggagttggaatgacaaagaccgtcgctatgcactctgggaagtagctccggaaatacgttattacatgggtgagaagaaagcctggtatctgggtgcgatgttcaaggccggacagttcaactacaagctttccgaaacaggcaagcagggcgacctgatgggtggcggcatcaccgccggctatcagctgcgactaaacaaggcattagatcttgatttcaacctcggtttgggctacctgaatgccgatttcgaaaaatatgaagtcatcgatggtgtgcgcgtgcgctgtggcaacgagacaaaaaattggtgtggccccatcaacgccggtgtgacattggtatggaagttattctaatacggaggaatagagtatgaaagcaagacaatatataaatatggtaggaatggcagccgccgtgctgctctcttcctgcgtgaaggacacgctttatgacacgccgcatcccgactatgggaagattgcggtgacagccgactggtcggcacgcggtgagggtatcgacatacctaccacatggacggttaccatgggtgactatacgggtacggagacttccgccacccatgcccccaaccatctgtttgctccgggcagctacacccttgcggtgtggaaccctgctgaaggaatcatggtaaatggtaccaccgccaccattgccgcagccacgggaaaccgggcaggaacggatgcctttgtgaacaatgccccgggatggttcttcacctatacgaaacaggtgagcatcgagaaagacaaggactatccgctgaccgctgcaatgaagcagcaggtacgcgaactgacgcttatcatcaaaccgacgggtgatgccgccggacgcatcacggagattgttgcccatctgacgggtgcagccagaactctcgatttcgctaccgatacctacggagccgcttcaaacgtcgtgctgcccttcaccaagataaccgaaggtgacgatgccggcaagtggaaagccacggtgcggttgctgggtgtgactggcacggaacaactgctgacggctgaaatccgctatgcggacggcaacccgagccccaccacgctgaaaagcgaccttacggaagctctcaaggagttcaacaccagaaagggcaaatcgctgaccctcggcggaacgctggttgagactcccgaaggcatggaagtggacggagccgaaatcaacggctgggaagaagtgaaaggtgatgatgtaaatgctgatttgtaaataattagcaaaccgaacgcagaagcaaagcttgctttgattttgctaaggtgcagcaattattgaaatggaatttaactaatataataacagaatataatgaagacaagattttttgcacttgcgatgctcgccctcgcactggcagcctgcaacaacgacaacgagaacctgaacggtgaccccgtggccgcccagtttaccgccgacatcgcccccgccacccgcgccagcggaaccacctggactgccggcgaccgtatcggcatcaccgacatcggcaacgattcccagtacggcaacgtgcctttcatcctgaaaaacgggaaatttgaggcagaaggaaaggttatctatatcgaagatacaaagacccatactttccgcgcctactatccgtacaacgcggcgggaggcatcctcacagccacgaccgatgccacggcgcagcaaaacctgcctgccatcgacttcctctttgcttcaggagccacgggagacaaaaacaacccggtagtaagcttcaccgacaaaaccgccaaaggcggtgaagacaactccttccaccaccgcatgagccagataacccttaccttcgaggcgggcgacggcgtgaatttcagcgtggtcaagcctgaacgttacacgctggacggattgttactcaccggtacgttcaacacggccgacggtattgccaccgcagacaacggggcacagaccggagaactggccatgaatttggcagacggcgttctcacgtcatcgatcatcctcttcccgcagacagttgcatccctgccgttggttgtgaattacaaaggtcaggaatatcatgccacactcaccgtgcccgaaggcgcactgctggcgggcaacaactacacctataccgtcaaggtacgcaacaaagtccttgaagtcagcgaagccaccattgcaaagtggaacgatatagacggtggagatgtgggtgctgacctgtaggattttaataattaatcgattagaatgaagaattatgagacatagattatttatccccgcagccaccgcactgctgttcgcccttgccgcctgcacgcaggacgaacttgctggcgataaccgtctgcccgaaggtgaataccctgtattcatccgtgccaccggactgtccgtagaagcaacgccgctggcagcctcttccacccgtgccgctgtggacggcgactggcagggcgtcacttccgtggcactcaagatgggcgatgcggtaaaggaatacaccgttacggcttctaccgatttcaagagtgccacgctctcacgcgagaacgacccgtactactggaccagccgcgacccgattaccgtatcggcatggtggcccttcaacaatgccgacatcacacagatgcctgccgtgaaggtggccgaagaccaaagcaaattggctgacttccagaacagcgacttcatctctgctgagaaccggaaggtggaatttaacaacccgactcttgaatttacccaccgcacggcacgcgtgacaatcgaactgaagcccggcacgggattcacgagcgtcgctggtgccacggtgagcctcgtgagcctgtccgccgataacggcaacccgaccgccatcaagacctacaacgcaagcggcaacacctacgaggcactaaccgccccgcagaccattgcggcaggcaaaccgttcgtcaaggtggaactcggcggcggcaccttctacttccgtccgcagaacaacgtcgtattagaagcgggcagccgctataaatataccgttaaggtgaacgccaccggcctgacgttagagggttgcaccatcggcagctgggctgacggcggcggcgagagcggcgcagccgaggatttgggctacatctacgacagcaacaccaagacctacacggtctataacaccaacggcctgatgaatatagccgaattagtgaacggaggtaagagcgacattaacattaccctcgacactgacattgacctcacaggcaaagactggacaccgataggcacagactacgacaactcatacaaaggcaccttcgacggtggcggccataccattacggggctgacctttacgacaaatgacgaatatgcgggtctgttcggctggctcaatagagctggtacggtgaagaacgtggtgatggagggcgtacagataacaagcaatcaaatatatggcggcagtattggcggcgtggtaggatatagctggggcaccattgaaaactgctcggtgtcgggcagcgtcagcggcacggtgtatgtcggcggtgtggtgggtgctcaaataggcggttccatcaccggatgcagttcctctgccacagtgaagggaacggtcgatgtcggcggcgtggcaggtcagacgaattcgagtgccaccctgaccgcttgctatgccacgggcaacgtgaccatagaaataaaccccgcaaagaatatcgctggcggcagtctggtgggaatgaacgcaggaagcagcctccttgcctgctatgccacgggcaacgtaaccagtacgggtagtagcactggcaaagtacatatcggcggctttttgggaaataactacaccaccgtgaccgccggctattggaagaacaatcatgaacaaggcatcggctacaatagggaaagcaccggagccacgaaggtggacggctctgtcgttacctggcagaaagccgtcgatgccatgaacaccgccttgcagaacgcaggctcaaggtggcgttacgaacttaaaggagcattgcctaccttgatgaagcagtaaaccgtcgggcggaaaagttctgcccgcaacggaaacaaccagagtaataaaataacagatattatgaggataagattttttgcacttgcagcgctcgccctctcactcgccgcctgcacgcaggacgaagcgggctttctgccggaaggggcggaaggcacacccatcgtcttcaccgccacggggctgaatcccgccgcgaaagccatcgccggcacccgtgcccccgcggatggcaattgggagggtgtgcagagcgtggcagtgctgatggacggcatggtgaagacgtacgacgtgacgccctccaccgccgaccccaccagcgccacgctgacctccaccgacccgtactactggaccaaccacaacgacatcaccgtcacagcgtggtggccctacaccgagggcgagacaaccccttctgctgtgaaggtaaaagccaaccaaagtgcccggaaagacttcgagggcagcgacctcatcgtagccgacggacagacggtgacctatggtagccccacgctccgcttcacccaccgcacggcgcgggtgaccgtcgttctgacggactacaccgaggggctggcatccgtgcagctgacgggtctctccaccgagaatgacaatccagataaaatcaccccgtatgacaagggcagcaacacctacatcgccctcgtagccccgcaaagtgtggcagctggcaggaccttcattacgtgcaccttcactaacggcaaaaccttcgtttataagatgaagaatgctaccgactggcaggcgggcggtgaatatacctacaccgtctccctcgctgcggcaaaagacctgggctataccatagagagcgacggcagctacaccgtgacctccgccgatggcctgatgaatgtagccgaattagtgaacggaggtaagaccgacattaacattaccctcgacaaaaacattgatctgacgggcaaaggctggacgccgataggcacaagcttcgataactcatacaaaggcactttcgacggcggcggccataccatcacggggttgaccgttacgacaaatgaccaatttgtgggtctgttcggctatctcaatagagctggtatggtgaagaacgtggtgatggaaggcatacagataacaagcaatcacatgtttggctgtactggcggcgtggtaggatatagctggggcaccattgaaaactgctcggtgtcgggtagcgtcagcggcacagattgtgtcggcggtgtggtgggttcacaaaaggccggttccatcatcggatgcagctcctctgccactgtgaagggaaagcactatgtcggcggtgtggcaggagaaaaatggggcaccatgacagcttgctatgccacaggcaacgtgaccttagaaatagcttcccaaaagaataactttggcggcggtgtagtgggattaaacggaggaagccgcgtccttgcctgctatgccacgggcaacgtaaccagtacgggtagcagcaccggcaatgtgcatatcggcggcttgtttggagatagctacaccaccgtgaccgcctgctattggaagaacaatcaggaacgaggctataagaccgcccccgaatccacgaaggtggacggcacttacgttacctggcagaaagccgtcgatgccatgaacaccgccttgcagaacgcaggctcagagtggcgttacgaacttaatggagcattgcctaccttgaggaagcagtaaaccgtcgggcggaaaaagttccgcccgcaacggaaagaaccgaagtataaccccaataaagaaaggaggacgtgatggaacacacggagaatccaccatattggttttggcatcaaggcattgtcaataataatatagtctccagtgtaaatatggaagctgtaagccggacattgtcaagattggtgctcattaaagacaacaaatcaagtatttaaattaaaaacatgggactttttcacagagacaagaaaaataatgacgatgagccggacagtgttcaaaccaattcattctctgatattatgaatggtttgcaatacgccgtaaactgtgcacaagatacattgcagaatcatcagatacaaaatctgaccagactttttgaaggaacaaatgcaaataacgcaaatacgttccaatcgaaaaaaatcatggttggagacaagactattgatattccacttatagctttgatatcccatcattatcttgcgatggataatgtgcagataaagttcaaggcgaaggtcggaagcgtggaatcacagattccagaaaacaacttattgttatccagcccacaaagagccaatctccagatgcagatgagcaacataaaaccggatgcggatgatgtcatggaggtttgcgtcaattttaaggttcaggagactccggagagcatttcccgaattattgacgattttgtaaaaaatatctaacaattttaaaatttaaatgttatggcagaagaaataaagaaccaagggcaacaagaaaatgcggaaaacttgaatgaaaatgtaagcggacaggcgaaagaaattatctccgctgcattggaagagactcaaaacagagaaacttctccagttcttaaagcagattcaaacgtgactgacaaattcaaggggcttcccatgcgggaacttattgcagctccacttattgcagcagccgaagcacaacaggaattggcagcgacagcatggaatttctaccagcaaattgcatttgatggtaaaagcggcaataaagcgcgtatattggaattcgatgtcgaaagaccgatacagcaggatggaaaaatgacaacaatgtcacaaagtgtcaaggctccgtttataggattggtgcctattccttccctgctcatagatcgcgtggatgtcgatttccagatggaggttaccgatacatcaaacgtaaaaagcactaccaacgcagaagtagaggcaaaagcttctgcaaaacattggtttataaatgcggaaatcagcggcaaagtcacgaccgcccgcgagaacacccgcatgaccaaccaaacggcaaaataccagatacatgtttctgccagccagcagccgcagaccgaaggtctgtctaaactgatggatataatggcatcatgtatcgagcctataaatacagaaagcagtaaatagagtataaatatatagaacgggatggataaagtcccgttcaaatttgataacaattattatgaaaacataataaatgcatcaaacatctaaaaatagccatatgaaaatttgtacatggaattcccaaggaaatcctcttaatgatgctattaaattaaatatattgaatcatctattaacaatagaacaatgtaatgttgttatgatacaagaatgtggtcaattcatactgcctgcacaacatagtggtagataccactatgttgtggtagaacatgcaggtgcttataatcagagatgtaatacttgtatcattgcggatttgaattttgtagcatcaatacattatctgatatcaggaacaggccgatccgcaatttgtttaaattataatggatgtaacatttatacccttcattgcgaatctgggtctggtgctgtaggagatataagagatttagtacgccatgcagtatctcctttcatcattggcggagatatgaattcaacgccaagcgaattatcagataatttaagaataatgaccacaggtaccagaagtaggccgggaaatagtgcttattttgcctgttgtggtatgccaacacatatttcaggtcgagaattagattatttccttatcgatagcagattacagctaaaaacatgtgtacgaggatatcatatgaagggtggggatcactatcctgtgatattggagatttagttaaccaattatatttttcataaacaaacagtgtcactgcgatataaaatattttccacctgtacggttgaagttgataaggattctgtcaacaaccccgattgtcactccccacatgtgcattgcctcatagcaataccaatacacattgataattgcgagtatgatactcacggcacggagaaaatccataatttttcccaatgctctcaaatcatcttcttgtgccattgtttttctattttgaagttatactttgattttacataaagctggctttctccattgttcaagaaagccaaccttgatgatacaactaaaggcttcgccctttgcgcttctttttctttctgcgtagttctctgtcgaatgctgcttcccgtgcctcgttggaagaacctcctcctgccatgagcccaagaccacttccatattcatcgaacaagccagaaccatgaaactcttgttccgagattgtgccatcttccttcgggatggtaagcggtatcggatgttcgttctcgtaaggcaaggtgaagtgctcctgcaaggcattggcagaaagattcgttccaagccttgaaccattgaacacgctttgggtgcggtggtcaattaatgttgctccgtagatacggccgtcagctgtatggcggaaaacaacatcaataccctttgctttcagcaactcaacgaacttatccttatggtatgtctgcttcaagactgcttccacgctatgtttggtcatctcggagagtttcttgtcctccttaaacttcttggcagaataagcgaaccgcttttctatcgtctccgcaccgacagacctgtcaatcttggaagccttgaaaggatttccaaccttatttccctgtccgtccgtggcagaatagacaaaaccatgatactcacgaccgccaacttcgcctctgacctcctccaaggatatattatataatgaaagaagtgcacggtactcgcccaaggactggaacctgtaggtggcgcagagtgatttcacggtgttggcaacctgcttcttcacattgccttggcttacatccaccttacggagtggattgtctgcctggcgttgcttgcggtctgccttgtggagattgtacatctcctccaagtcacgggtgatagccttgctcctgtggtaattatatcgactgtccaagcatttgccgttctcatccacccggatggtcacgatgtgcatgtggtgacggtcaatgtcctcatgcttgtaaaccatatatggctggttgccatatcccatgcgctccaagtattcccgtgcaatattctccatctccatatccgtcagcacatcatcaggatgcggattcagggagatatgcacgacaggcttttctgttctgatgtgcggagaaaggtatcgctggaaatcacgcaaggcattggtgatgcttgtctttcccgaacaatcatcgaagatcttgttcgttgccaagagctttccctcttccttgttaatcttctcaccattgtatgccagtgcgccatacaatgaacttccgaaacttatctttgcgaccatctttcctcaaacttacgggttagttcaacaatctcacgggtaagagagaccagttccctggtgcagttctccagcttgtagagcaaagccatcgcctttttctctgagaaatgacaacggagttccttgacaacctggttgtagttgttgccaatcattcggtactgcgagtgaaaagaagaaagcttggtgtagtattccaccagcgtcttgtcctctcgcaacaccttgaacggttcgccgaagatgcgtgccttggcaaagacagccttcgccttcacatcagtctgctcatacatgacgaggaatttcatccactcgtcatcgtcgaaccgaaacatcacatggtgcgacttcgggttcagcttggggattcgtccccctcgttttctttctgtgttcatataaaatggattaagaggaacatacggcaatgatggaacagtgctaactatcgtcagattgaaacatggggagcccgacttcggagaggctaccaacccggcagggcaaggtctttggagagtaactccaaaggttttgagtaactcaaaacataccttgctatgtctttgaggacataaaaatccgcttagggtggattgaagttagccttcgtaagaagctgtccccatcccgaatggaagctgttcgggaaatccagtcctttgcggaacatcaagccttgttcttctcggaacgatatggatgcgccatccattgctttgcctttcgggtgcaaaattacggctaaaatagcacccttggaacagatgcgccccagacaaccactgcaactatcggcaacatgctgccacaggattttaaaaccattgtttttcggaaaaagcgttgttactttgcagccgtaaacatcgaactaatgatttgaaaatatgatgaaacaagcatttgcagcaacgaataagcctgtcactattgcagcgtctctttgtatccatgatgctccactgacgtacagacttactgattcactgtcgtactgtcgtatggaaatgatgaagcattgcaacagttcaaggtctccataatggagcaatgaccgatagacatggacatcaaagtgttcatatctttgaattggcaggaaatcatagaaacgagtaatcaacaatttaaaaagttaacgatatgagtaagacaagatttgttgcgttcgcaacacagaaaggcggaataggaaagtccaccatcacggctcttgtagccaactactttcacaatgtcaagggttacaatgtggcggtcatagactgtgacgagccacaatacaaccttgcagacctgcgagacgaggaactggaactcatcaaaagcagcgactatttcaaggcgcaagcctgtgagcatttcaaaaagctgggcaagaagtccttcagcgtaacgagaagcaatgctgtcaatgcgcttgacgacgcagagacagtgttgaatgaaacagaggttaaacttgacttcatattctttgacatgcctgggactatcaaaagtgagggcgtcatgaagaccttgtctcagatggattacatctttgtacccgtcagcgcagaccgctttgttgtagaaagcgcaatgagcttcatgcagttgttccacgacaactttttgacacagggttggtcggtcaccaagaaacttgctttcttttggacaatggttgacaaacgagaacgcacgagtttgtatgatgtatatgaaggtatgttcaagtctctcgactattcggttctcaacacacgactgccagacagcaaacgtttcagaagagagctgtcggagaacagaaaggcagtgttccgttccaccatctttccatcagacccaaacctgttgcgagggagtggcatcaaggagttgtccgacgagatttgtgaaaccataaagacatgagcctatggtaagcagaaaaatcaacactgacgcaatagatgaaaatctgctcattgcctctattggcaagagcaagattggcacgacaacggcatccattcttgacggagcttcccaatcccaagtgaaagataccgaagagaaagaagaggttggcaggaagtcccaatgctcgcagaccgataagtcgccaatttcacgcaagcctcccaaggcttcttcggaaagttacgattcggcattcttcaagcgaaacgagataaagactcgtcaatgcgtttatatcagccgtgagatacacaggagaatttcaagaatagtcagtgtgctcgcaaagcatgagttgacagtcggtggttacatcgaccttattcttgagagacatcttgaagagaaccaggaagaaatcaacggcttgctgagaaaagagattgacgattggaatatgtaacaaaaaggaacaagcatgacaatggaaactatattcttgatagtcttggctgcattcaatgtttggactatctatttttacaacaagttgctccttgaagttgcgaacggcaaggaaaaggagaaaaaaccacctatcgacccgatggcacttgtaggcaaaagtcttttcaaagtgtcccaactgcggaagaaagaagaaacggaacaaaaacaaacagaatccatgtccgtatcggataatgacgtgacatttgacgattctccaaagagtacggcacggatttctgacgaacagcttgatgacgtgtttacgaatgttcgcatagaagatattggtgtgaaatattctgataatgagggagatgccgatgtaccacaagccaaagggtcaagttttgaggacattgacgcagctgtgaataccgtcaaggcaccgaaagcaacggacaaggagaaaagacatgcaggcaaggttttccatgagatggatggcaaccaattctatgagaaattcatggagaacagcgaggagtgcaagaagaacatccatgattacgtcaccttctacttgcaaactcacaagattgtagagatttccaagccaaagaaagagtttaaggtgccagacagtatagaggacttcaatatcctcgactttgtataacaatttaataaggagaattatggaaagaacagaagaaaacaatgcaacaaaggatagatttgcacatgtgggcaaaacattctcggaaatggacagcgaaaagctacaagctgaaatcgcagaacgctcaaagattattaaacgcaaaatagatgcgttgatggaattgcatatgtcaggtatctgacaaaaactgttgaggttggattttcaatagtcaacaagtatttcaatagcagagaatttgtataacaattaaaagaatgattatggcagacaaaacaaaaaactgtggtaaaggacaactcacttcgacagatgccaaggagttgtatgaggctttcatgagaaattatgaagagacaatggaggaagctgggaaacagattgacgcttgtcttgaagagacatttcaagaccgtacatcgtcaactatttccgacaaggaggagtgttttgatgaagatgcagcatatgagaattatgatgtgggtgaatttgagccaatcgacagaatggagaaagagcgtgctgagcagtatgtcggtaagttcatggcaaatgcaggttttaccgcaagatatggcagacatgttggcatcagcgaggacattcatgagcgtgtgactaaatttgtcagtatcgtaggcaagggaaagatttccattgcaagttatgtggataacatcatcaacgaacacttcaatgcctatgcagccgaaatcaaggctgcattcgatgaaggtctcaagtcgtatcgcctctgacaataaattaagagtacgccaatgaaaaagaaagactacggctaaaatctcagctcgccactgaatccataggacggcatcatgccgcattagtaagcaaaagtgtcaatcgccagatgggactatctcccaaggaacagaaaaaacgatttatgaataaaggacagtccttttgatttgggctgtcctttgttattctgcaggcatcgcagataaggaaaaaacggttctttgccactttctttccgctcctcggctcatgaagaaagtggcggaacgaattttcatcgctccgcctaaattataataatgtggtgttatgtcgttgcaaccattcgttgctctataagtcttgcattgctgttcactaagttgatgatgtcggcatggtgctcggtgtccttgttctgtagtccgtggcattgtacgactttcatctgttcgagtgaaaactccacggtctcaaccctttgttcggctattcttgcagagaagatgatgcagtcgggattgagtgagtagtttgtaccgctgcctacgcaatggtgcatcgccttaccctcaagaacgtgctccctgacgctttcaagcattctcaccacgatattgccgtccgtgaacatcaaaccgaagaaacggctcttcatttccttgaacttatcctcgttcttcaatgccttgcgtatctcctcctcggtgcgctccttttctttcttggctctgattttctcggatattctgtcgtgctcggcttcaaggttgtcgggacaaatgtaatgtggacttctgatgtccttgcccatttctaccaacatacagatgtagtccgcccatttgccgatgtctgtaataaggtaatggttgcggttggctatcttgtaggcattccaacaagtttccaagtgccgtggatggtctatgaagtggcggacgtgtccgtaacgacattgtttcatcatcgtttcgatgcggtggtctgtcagcatcgccttgaacaatgtaagcggttcgatgccgtgaaacgctccgtcaaagccgttgcgccatatctgaggaataactttcatgtcgggacagaccgaaaatgaagcaatatgctgataggtggtgttgtccttgcgcagttcaatgtcggagtcgtagcagaacgtgtccatatagatacccattgtgcgcttgcgtgccataacctccaccttgcctttctcgttcatccaatagcgtgccacctcccaacaataaatgtctgccttttgtcccttgcggtagtatgctttcatctgatatgctcgcataagttgcagtcccttacgctcagtgagtacgctgaaataggtagaagacattgccttctgtcgcttggtgcgctgcacttccaactttgccttacacttcgggcagacacatttgtccgcatcctcgtccgtagtccaagtgtgtccgcagtccatgcaggtggtctgtccgtgcttcaactgaaaggcatagtggtcaagacattcacggaatgcccattgcatttgcgctcccttgataggtcgtaaccccttgtttgaggttacgacttgcttctgatatttcgttcttggtttcataacgtgtcgaataatgatggttggtgtacttctgtttccgttctctgtgaggtgcgcttggcggtatctctgttacgcatcttgttcatctgctcttgctgatattggcggatggcttcctgtcttgcctgtgccttctcctcctctgtgagttcgatgtggtggttaacagacacttggcagttcaatggttttcctacctcgatgtccttctcctcgtagtagtggatggcttgcccatatatctcgtcatcgcaaaagccgttgcaaccgctcttctgtacccaattaaggatataggtgacgcaatcgtctatgttcttgtcggggttgtcatacttggctgcaaagagttcgtcctccattgcacgctcctccaaataggcttgtatggttctcttgaaatattctgtagtgttcatatctgatgttgttaaaggggttgttactcatgatagatgatgtcgcagtcctcaacttctgtaggcagtccgaagaacggataatggctgaagtaaggttctgtgcacatgtcctcgttgtatcttggacttactatctctatattgttcttgcgcatggcttcgtccaccatacggatttcctcgtctgtcagtccgcttgcatcgccattgatgatgtagcagagtgcccatgtaggtatcgcttcaatgcttctgttcatatcgcttgctcattaaatggtttgcttgattagctcaatcgtatatttcgggttcacctcgttgaagatgaagtccacgaaatcacgtcttgcgtccttgttcaactctctgtagatgtccttgaatgatgtgatgttaccattgatgtatgtgtccaccatatactcaaagatgttgtccacctcataatatctgcactgctgtgatgcagtctttgaatgtctttttgttcccatattcttgtatgcttaaagtgtcaataaccaaatgaatgttccaatcagtaccaccatagaaagaatggaaatgatgatgccgaagatgaacttcacaattcccaatatgacttcaccgaccatgcagagagccatatatcccaaccaagcaaccaaagtgatgagggttgagccgactgcggagagtaatctccaccaagtctgtgttatgttgatgtttgttgtcatatagccttgaattaaatttatttgcggttccaggagctgaagggaagttctcgtttcttcacctttttgtcgctcccttttccgacatttttttttgcgtcttcctgtcgcatcggtcgtttcgtttcaggtgcctttcaagggcggcgaggctggaaatacaaggttttacggaaaaatactacccaacggtgtggagatttttgcgaaaaccgaaggctcgaccttttatttccaaagcccgctgccatacctttgcacctgcacgataacggttgatgccaaaaggaaagaccatgtggaggaaagaaaatcagagcggcaaatgaaaatagaaacttcacggaagtttttggactgtacgattatcgcatactcatttctgagaaattgatacaacttcgtcttacaaatgttttaggaaaatggaaatcgcatacaagaatggcacagccttcagagaaattccagtgaaagaagagtatggcttgtccatgcttcttgcatcgggttttctccaaggctgtgcagtcaagcatgaaagtggtcgttggggtttacatcaatgacttctttcttgcggtggagtatgcaaacaaaattgtacggcaaatcaaggaatggtgtttcttttgatcggttagcctgcaaccgacaaaaagaagcacttttcctcatgccgtactactaagacatgaaagggtggcgtgccactgtttcatgtcgtttggattgtgcaataaaaatggaactgcgagttgtggctataaaagtcagccgttgtcagcacggcaaacaaagaaaagtccttggcagtatagtcttgaagcatttcaaggcatactgtcaaggatttttcttgccgtgccatagtcggaggaagttagtctgaggtacgaggactgtctttcttcgacgacggctgagttttatacaaaacacacgaaaggatgagaatatgcaaacgaaatagaccattcaaaacaggaaccattgccacatatgtttgaatggattgaaatggaaatagcaaagaatagagaagaatatggtttaataaaaaatagatttatccaagcaaaaaatcgaggataaaaaatcttaaaacattctttatccccgattaaatatcgtacctttgcaaccgaaagagttctttggatggttatgcaaatcacagcaggatgctacattctgtttatttctaattcgtaacctcttctttttatgagataaaaacttatctcattctcaatcacttataaaaaatacgtactttcgtctaattaaaataagaaaggaactattatggaaagatcttttagtgaagctttgaaacaacgtcgaacttactattcaattactaatcagtcacctatatccgatcaggagatcgaatgtatcgttaatatgaccgtgcgccacgtaccgtcggcattcaattcgcaatctacccgtgtggtacttctattgggagaatcgcataagaaattgtggcagattgtgaaggacgcattaaagaagattgtaccggctgaagcgtttgtcaagacagaggagaagatagatcattcgtttgcctgtgggtatggcactgtattgttttttgaggatcagaaggttgtgaaagggcttcaggaggctttcccggcttatcaggagaatttcccgggatggtcattgcagacttctgccatgcaccagttagctatctgggtaatgctcgaagatgtaggtttcggagcatcgctgcaacactataacccgttgattgatgaagaagtgcgccgtgcatgggatttgccggaacattggcatttgattgcggaaatgccgttcggacttcctctcggcaaaccgggtgaaaaagaattccagccgcttgaagaacgggtgagaatctttaaataaatcgggaatgaagaatgaataatgaagaattggatggcataatggctaaaattctttattcttcattcttcattcttcattaaatgattaattttgctcacaaaattaatcatttatggttcgtatcttccttaccggctatatgggtgccggaaaaacgacgttgggtaaggcttttgcccggcaaatgaatataccgttcatcgatctggactggtatattgaagagcgttttcacaaaaccgttggagaattattcattgaacgaggcgaaacaggattcagggagctggagagaaatatgctccatgaagtagctgagtttgagaatgtggtaatttcgacggggggtggagcgccttgtttttatgataatatggattttatgaaccggaccggaaagactgtttttctggaggtgcatccggatgtgttgttcaggcgcttgcgtgtggctaaacaacaacgtcctattcttcagggtaaagaggatgaagaactgaaagcgttcattgttcaggcactcgagaagcgtgctcctttttatcatcaggcacaatatatctttaatgcagacgaattggaagatcgttggcagattgaaacatcggtgcaatgtttgcgacaacttttgggattgtagaagtaacagtcgttatattttgtgtaatcgtcatttggaaagctgtggaatgtgtgtaatttgtgcctgataatgaatgattattgggaggaattttactgtattcagaaatcaggtagttgtaatgttctctttttgttggaacttcgttttttttgagactcttgtttgtgcattcggtcaatatttgtaccttgcactcgttatgagattttttattgactagtaacacaaaattaaggtaaagttctatatcatgaaaactttaaaagagaaatttggggagttatccgctaaaattaaagcatccggacagcctgcaagggtatggtttccgcagtatacaccggcttcattgttaagtgcggaaaactggtgggaagcattggctgtatgtgaatatgctttggacacaaaagaagacgagaaattaacagaagatttttttgaactgatattcagtgcttttgactgtaacgtagaggtggaactcaacgcggaagaatatgaattctggtgggaaaaggtgatgcaggtatgcgaccgtgtggcagagtttagcggtgcgggatgggcgcagaagggggcacaatattccgaagcccgttatggaaagcgggacatgagttatttgtttccatactacgagaaggccgccgatatgggttgggctgaagcggaagcaactgttgcctattggcgatacatgggattctattgcgaacaagataaagaagagggtgaacggcgttttgcagctctcacttctcccgaagctattttatggggaaagcattatcgtgcttttgccgaagaatttgcaggggataaagcaaaggcattacagatacggaatgaactgcttgccgaactgcctgaaggtgaacgtttgcgtgctcatgtatatgcagcgttgggggatgcgctcgacagggcggaaggtaacgtggcagaggaagctgcttattacgaaaaagccctggaaatagttcccaatctttatagtcttaaaaatctggctacgctttatttccgttacccggaactgaataaaccgaaagaactgagctttgaactttgggaaaaggcttggtatgccggtgtgtggtctgccgccaatttcctgggatataactatcaggaggaggaatggctggatatgcctaaggcgattgaatggctggaaaagggcatgctttattgtgaaccctacagtgcgtatgaactggcattgatctacctgtataatgatgaatataagaacgtggaacgtggactgatgtgtctgaaccgttgcgtggaggatgattatatacaaggtatcgaaggactggccaatatttatttcaacggtgatttggtgccggaagacatgaatcgcgcgaaagagttgttggagaaagccattgaattgggttcgggaagtgcagcttatcgtttgggctggatgtatgaacgtggcttcttgtctgaagaaccggattatgtgaaggctttagagttttatgaaaaagcggcttcactgaataatgccgatgggtattgccgtgtggctctttatctggctaatggatatagcggtgtgaaggaccctgtaaaatcaagggaatattatgaaaaagcggccgaactgggtgcttgctttgcccttgtggaactggcattcttatatgagaatggcgatggagtggagaagaattatgaaaagtcatttgaactgattagcaaggctgccgaacagggttatccttatgcaatgttccgtgtaggtctttatatggaaaagggtgttcttggtgaagtgaaaccggaagaggcctttgcctggtatacaaaggcagctgaagcggacgataatgatgcgatctttgctttgggacgttgctatagagaaggtatcggaacggaagaaaactgggatagggcactcgaatggtttagtaaaggggcggaaaagaatgaagcccgttgtctgacggaactggggatggcttatgagaatggtaatggcgtggaagagaatccacagaaggcagtggaatatatgatgaaggctgctgaacaggattatggctatgctcagtttaagatgggagattattatttcttcggttgcggtccctgtctggaagataataaaacggcagtggaatggtatgaaaaggcagtggctaatgagattccgatggctatgctgcgtgtgggtgaatattatctgtatgactatgatagcctgaatgagtcggaaaaggcttttgcttatttcaagaaagctgccgaatatgaatggtatagtgaaggactgggtatctgttatgaaatgggtatcggagtggaagagaatgaaacggaagcctttaaatattatacactggctgcggataatggaaatacgacaagtatgtatcgtaccggactttgctattataacggagtaggtgtgaaacagaattatgccgaggcctatcgctggttcacggatgcggcggggaatgagaatgtcgctgcaatttattatctgggcaagatgatgatgtatggcgaaggttgtaaccctgatccggaagctgcagtgcaatggttgctgaaagctgccgagaaaaataacgataaagcacaatttgaacttggaaatgcctatctgacaggaaatggcgtggaagaaaacgatgaaattgcaatggagtggttcgaaaaggccgcagagaatggcaatgagaaagctcttaaaatcaccggaaggaggaggaagtaaaagaggaatatggaaaaagaagggaataatctgtttcaggtcaatcttaaaggtatgattgccctgttatcagagcacatttatagtaacccgaatacttttgttcgcgaactgttgcagaattgcgtagatgccatcacggcactacgcaatattgacgagaattataaaggtcgcatcgatgtctttctgaatgaggacaagacagtggtatttcgggataatggtatcggactgaaagaggaggaagtttatcgctttctgactgttatcggggagagctcaaagcgggatactcccgatgcggacgattttatcggaaggttcggtatcggattgttatcttgttttgtggtgaccaatgaaatcactgtagagagtcgttctgcaatgggcggacagcctgtttgctggtgtggaaaagtggatgggacgtatcagctgactttatcagacgaagaacggcccatcggctcacaagtggtattgcacccgaaaggagactggatgcatctttttgaatatgaaacatttaagaagatactggtcggttacggagaagtgctgccgtatcctatctatctgcattatcagggggaagaggagttggtaaatacgccttcgcctgtatggcttgacccgaaggcgactcgtaaggagttgctggattatggggcgaaagtgtttcagtcgtctgctctcgatgctttccggatctatactgaaagcggcaaggtggaaggggtgctttatgtcctgcctttccgtacacaattttcagtgcgcaactctcataaggtctatctcaaacgtatgctgttgagtgaggatgattgcaatctgttgccgtcgtgggctttctttatccgttgtctggtgaatgcggacgggttgctgtctaccgcttcccgggagtctttggtgagtaatgaccaactgaaagatgcccggaaagagatcggggtggctatcaaggattatctgcggggattggtgcagaatgaccgtgccatgttcaatcggattctggatgttcatcactttcatatcaaggcgattgcttcggaggataatgaattgcttcgtttgtttatggattatcttccttttgaaaccaataagggtttgcgtagctttggaagtattcgttcgacaagcaatgtgatatgttataccaagaatctggaggatttccggcaagtgcggcgtatagccggagcacagggttggctggtcgtgaatgctgcttatacgtttgatgaaacgttgttgaaaaagtatgtccgcctgaatccggaacttactttggatgaaatatctccttcacggttgctggagcagtttggtgaagtggaggcgaaccaggagtttcaggcttttgaggtgaaagcgaacgagttgttgaagcggtttggctgtatctgtcgtctgaagcattttactccggtggatattccggttatttttgtggcggaggaaaaggagaatgccgctaaaagtgctaataatccgttggcggctgtactgggagctgtgaatactacaaagcagattccgccgacactcactttcaatgcggataatgaaatggtgcagaccttattgcaaatacaaggagacaataaactgtttcagcatgtggtgcatatattgtatgtacaatcgcttctgcaaggtaaatatccggtaaacagcgaagaaatggagcttttcaaccattcgctaagtgaactgatgacttcgaaaatgaatgattttataaatttcctgaattaaaaaagagtatgagatacacacttgaaatacaaaaattgctgttgcagacacagaataacaacctgcatccccgcgaaaaagccaatctattgaaagaagctatccgcatcgccgatgagaacgaagatgtggaatgggctacggagttgagactggatcttatttatgaactgaatcttctttcggcggatgctgaagagattaccgtgttctctaaaattctggatgattacgagaaccacaaggatgtgattaaggaagatgacttgttgtggaaatataagtggatatgggcttgtacgttcgatcttccggagatcccgatggagcaggtacaggcaattggggaggattataaaacccgtatcctccggaacggatattctttgcggagttattatcaccgctggtctgtggaatgtgtctggatgcggcagtatgacaaggcgaaagaatacattgataaaatgttgaatgagaagatagacgatcagtcgtgtgaggcttgtgaattgaactttatgctggattattatctggaaacgggacagtttgatgaggcttacagccgcgcgcaaccgttgattaataagcagatcacttgttatgaagccaatttgcgggcctatttgaagcttgcttattatgcgcagaaagcaggtaaaccggagattgccgccgatatgtgtgcacgtgccgaagaagcattggtgggaagagagaaggatgaatatcttttgctctatctgggattgtttattgcctataatatgatgacgaagccggaaagagcttgggaatatgctgaacgctgtattggttggagtttgcgtactaatacgctgaagagttatcgtttctcctgtgatatggtagaggctctgaaatatgaaacccgtccggaagtctcgttgtctttgccggaagagttcccgctttatcgtccggatggaatttatcaggtaaacgaacttcgcaattatttctatcaacaggcagaagagctggcacgtcgctatgacgcccgtaacggaaatagtggttatatggaccgtttgaaagatttaatgtctaattaattgccaacatgtagattaatccgtatttttgccgtccaattatttactaaaaacactgaataacagaaaatgagaaagtggcgtattgaagattctgaggaactctacaacatcacaggttggggtacctcgtactttggtattaatgacaaaggtcatgtagttgttacacctcgtagagacggagtgactgtcgatctgaaagaactggtcgatgagttgcaattgcgtgatgtggcttctcccatgttgatacgttttccggatattttggacaaccgtattgaaaaaatgtcttcctgctttaaacaagcggccgaagagtatggttataaagccgagaactttataatttatccgattaaggtcaaccaaatgcgcccggtggtggaagagattatcagccacggaaagaagttcaatctcggactggaagccggttccaaaccggaactccatgcagtgattgcggtcaatacggattctgactcattgattgtctgtaacggatataaagacgaaagttacatcgaactggctttgcttgcccagaaaatgggtaaacgtatcttcctcgttgtagagaagatgaacgaactgaagctgattgcaaagatggcaaaacagctgaatgtgcagcctaacatcggtatacgtatcaaactcgcttcttccggtagcggaaagtgggaagagtctggaggtgatgccagcaaattcggcttgacttccagtgaacttctcgaagcgctcgacttcctggagagcaaagggatgaaggattgtttgaaattgattcatttccatatcggcagtcaggtgacaaagatacgtcgtatcaaaacggctttgcgtgaggcttcacagttctacgtgcagttgcactcgatgggattcaatgtggaatttgtagatattggcggtggactcggagtggattatgacggaacccgttcgtccaatagcgaaggcagcgtgaattattccatccaggaatatgtaaacgactctatttctactttggtggacgtgagcgataaaaatggtatcccacacccgaatatcataacggagagtggacgcgcattgacggcacatcattctgttcttatctttgaggtacttgaaaccgctacattgcccgaatgggatgatgaggaagagatagctccggatgcgcacgaattggtgcaggagttatatggaatctgggattcgctgaatcagaacaagatgttggaggcgtggcatgatgcgcagcagatcagggaggaagcgctggacttgttcagtcatggaatcgtagatctgaaaacccgtgcacaaatcgagcgtctgtattggtctattacacgtgagattaatcagattgccggcggtttgaagcatgcgcctgatgaattccgcggactgtctaagttgcttgccgataaatatttctgtaatttctcgctcttccagtcgcttcccgactcttgggcgattgaccagatattcccgatcatgcctatccagcgattggatgagaaaccggaacgttcggctactttgcaggatattacttgtgactcggacggtaagattgctaattttatttctacccgtaacgtggctcattatctgcctgtgcatacactgaagaaaacggaaccttactatgtggctgtgttcctggtcggtgcttatcaggagattctgggagatatgcataatttgttcggtgatacgaatgccgtgcatgtttcggtgaacgagaaaggatataatatcgaacagattattgatggagaaacggtagcggaggtgttggactatgtacagtacaatccgaagaagctggtacgtacactcgaaacctgggtgacgaagtcggtgaaagaaggaaagatctctttggaagaaggaaaagaatttctttccaactatcgttcagggctttacggatatacttatttggaataaccggcaaggtgccggagccggattctccattcggtgaacttattagaaatcaagaaatgagagaaaaactaacagtaattaaggtgggtggcaaaatcgtagaagaggaagccacccttcgtcagttgttaaatgactttgccgctatcgccggacataaagttttggttcacggcggcggccgttcggctacaaagattgccgcacaactgggtattgaaagcaaaatggtaaatggtcgtcggattaccgatgctgaaactttgaaggtcgtaacgatggtatacggcggattagtgaataaaaatattgtggcaggtctgcaggcacgcggagtcaatgcactcggattaaccggggcggatatgaacgtgattcgttcggtgaaacgcccggtgaaagaggtagactacggttttgtaggtgacgtggaaaaggtggacgctactttgttatccgatttgatacataagggagtggttccggtaatggctccattgacgcatgacggacacggcaatatgctgaacacgaatgcagataccattgccggagaaacggcgaaagcgttgtcggccctgtttgatgtgacattggtatattgttttgagaagaaaggcgtgttgcgtgacgagaatgatgacgacagtgtgattccccaaatcacccgtgccgaatttgaacaatatgtagctgatggcgttattcagggaggtatgattcccaagttggagaattcttttgaagcaataaatgcaggagtatctgaagtggtaatcgccttagcatcagcgattaataactctggtggaacaagaataaaaaaataattcaaaaaaaagtagtgggcgactgtaacttttcatatcctagcccgtcattattatagagatgcaagaaatcagcttccgaaacgatattttgccgttgaaggataaactctttcgattggctctcagaatcactctggatagggccgaagccgaggatgtcgttcaggacaccatgataagagtgtggaataagcgtgatgagtggtctcaatttgaatcggtcgaagcctattgcctgacagtggcaaagaatctggcgatagatagaagtcaaaagaaagaagctcaaaacgtggaactcacccccgagatggaggaagaacctgatgcaaacagtccgtatgaccagatgattcatgatgaaagaatgaacattattaatagactggtaaacgaacttcccgaaaaacagcggcttatcatgcaactgagggacattgaaggtgaaagctataagaaaattgcagggttgctgaatctgacagaggaacaagttaaagtgaacctcttcagagccagacaaaaagtaaaacaaaggtatttagaaattgacgaatatggattataaggatatagaacagctcctggagcgatactggcaatgcgaaacttccgttgaggaggaagcaacattgcgcgacttcttcgcaaaggaggaagttcctgctcatttgcttcgctataaaaacctgtttgtttatcaacaggttcagcaggaagtaggactgggcgaagactttgatacacgtattctggcagaggtggagcctacggtcgtaaaagcgaaacgcttgacactgaccggtcgttttattcctctgttcaaagccgctgccgtgattgcaatcatcctttctttggggaatgtggcacaacattctttctccggagatgacggaagtgtattggcaacggataccattggtaaacaagtaacagcaccatcggtcgctatctcaaatgatgtgaaagcggaacaggttctggccgatagtttggcgagggttaaccacaaggtgcaagttataaacgaatagacattttcatttgctttaaacatataatatagttagtgtgcttaattaaaacaacaacgaaggcgaaactgtgaagttttcaattctctcaaatttttagattaaaactaactaaataaatgggctaccgcgcgatgcagtagcccttttatgcttttagactgtatttgttcaaattgtctttatttgatctgccgtatgtttttccgtggagcatccacttcttgtggattgcctttataggcaatatcgccacttcctttcacgcgggcaaccagtttttgacttgcataacaactgatgtttccggatccactgatacttgcatccgtattctctgcttctaaatctgcagcctgaatgtttcccgatccggcaatagcatattttgcttgaatggctttacctttaagattaatattacccgaacctgaaattcctgcctgacattcctggctctctatttgttgcagtctaacatctcccgatccgttaattgaaacagccattcttcggcaattaagcccttctccctgaatgttccccgaaccatttatatggaactcgatatctttagaggtttgtattccattgattaattttatatttcccgatccgttgattgacagcttattcagttccggagcaaaaacttttatttccagttttcctttccatatactgacattcttcttgaattttatcattaatgtattaccgtctacatacgtttctacaagtggtataatgttgtcggaaccatgtatctccacgtgactgcgtgtgtcttggtgataactgatattggcacttcccaatagtttgatttcattgaaatgatcggcttttacttcttgggagatgtagtttttgctgcctactacgtgttttccctgcaagcaagagccggcagtaagtactagagacaatccggtgactaatacgagcaataaacttgttttcataattatgtttttctatgattgatatgacagttagacggaagaaactgatataaagttgcatcttccgcgaagtttttcattggaatcttcttttttattacttttgtggctgttgataggaggattataatggataagatcgtagaagatgacgaattaggacgtctgatagtgcgtgtcaattcacgtgcgaggagtcttgtgtttcgtacaaagagtgatgctgtttatgtttcagttcctcccggcactacattgaaagaagtgaagcaggcaatcgagaatctgcgtggtaaacttctggcctcccgtcaaaaattagcccggccattgattgatttgggctataaaattgatgcggaacactttaagttgtccttggtgtccggtgaaaaggatcagtttttggctaattcccggttgggggttatggaaattgtttgtccgcctcatgcggattttacggacgagaaactgcaaagctggttgcataaggtgattgaagaatcgttgaggcggaatgcgaaaagtatccttccttcacgtttggcttccttgtccaagcaatgcggacttccttattcgagtgtgaaaataaactccagtcagggcagatggggcagttgctcggctcgaaaggatattaatttgtcctattacctggttctgttaccttctcatttgatagactacgtgttgctgcacgaattatgtcatactcgcgagatgaatcatagcgaacgattttgggtattgctcaatcaatttacagaaggaaaagcattggctttgcggggggaattgagaaagtatcgtacggagatttagaatactttattgccaggatagtgctatcgtgttggcacacttgtgtcaacacgctggcacagtcgtgacaatgcgatggcatggttgtgccaatatggtggcacagacttagttaatacttttattacttggctaattgtttaatcccgtctgattctttttcgaactgataagttcctcctttttcactaagatcaaacgtagacactaattctgtgttattatctacaatcaacaaggcgctctgttcggcaaaacgtcctatttctacagtgtaaggttcttccgacatggttttgttggagatcagactgtcgttgacaaataaagagatagaatctccggcaaaaccttttaccagactgatcgtatagctttcgatgaaatgacgttcttcctgcttttcccgttgtagccgcatgctcatatagacaaaaataaccacgacaaaaatgacggcaaaagcaagaattccgttacctaccataaactgtttatttgtgttgagacgatgtgccatagtcgttattttttgaattacggcgtaaagatacgaatatagcactgttaattcatactttttttctttaatgttttgtagtcgaacagattatttatatctttgcaaccgaaaacggatgaaaggtggaggggcaattaagctcctttttttgttcttatatagctaataaatgatagaaaagaaaactgtttgtcagattgtagaagagtggctggaaggaaaagactactttttagtagaggtaaccgtgagcccggatgacaagattgtggttgaaatagaccatgcagaaggtgtttggattgaagattgcgtggagcttagccgcttcatagagtcgaaactgaaccgcgaagaggaagattatgaactggaagtagggtcggctgggatcggacaaccctttaaagttctgcaacagtattatatccacatcggacaagaggtggaagtgctgaccggagacggacggaagctggccggtatactgaaagatgccgatgaagagaagtttacggtaggcgtacaaaagaaagtaaaaaccgaaggatcaaagcgcccgaaattggtagaagaggacgaaaccttcacttatgagcaaataaaatatactaaatacttaattagctttaaatagttatggccaaaaaagaagaaacaatcagcttgattgatacattttcggaatttaaggaactgaagaatatcgatagaacgacgatggttagcgtactcgaagagtcgttccgtagcgtaatcgcgaaaatgtttggcaccgatgaaaattacgacgtaatcgtgaacccggacaagggtgacttcgagatatggcgtaaccgtgaagttgtggccgatgaagatttgactaacccgaatatgcagatttcgttgagcgaagcacagaaaattgatgcttcttacgaagaaggtgaagaggtgactgacgaggttatctttgccaagttcggacgtcgtgcgatcctgaatcttcgccagacactggcttccaagattctggaactcgaaaaagacagtatttataataaatatatagataaggtaggtactatcatcaatgcagaagtatatcagatctggaaaaaagagatgttgcttttagacgatgaaggaaacgaattgctgttacctaagaccgaacaaatcccgagcgacttttatcgtaaaggtgaaacggctcgtgcagtagttgcccgcgtggataacaagaataataatcctaagattatcttgtcacgtacttctcccgttttcctgcaacgcctgttcgagatggaagtacccgaaattaatgatggtttgattaccatcaagaagattgcccgtatccccggcgaacgtgccaagatcgcggtggaatcttacgatgacagaatcgaccctgtaggagcctgtgtaggtgtaaagggaagtcgtattcatggcattgttcgtgaacttcgcaatgagaacatcgacgtaatcaattatacatcgaacatctcattgtttatacagcgcgctttaagcccggctaagatttcttctattcgtctgaacgaggaagagaagaaagcagaggtattcctcaaaccggaagaagtttcgctggctatcggtaaaggcggtttgaatatcaaactggccagtatgttaactgagtacactatcgacgtgttccgtgagttggatgagaatgtagctgacgaagatatctatctcgacgagtttagagacgaaattgacggatgggtgatcgacgctatcaaagctatcggcatcgatacagcgaaggctgtgttgaatgctcctcgtgagatgttgattgaaaagacggacttggaagaagagacagtggacgaggtaatacgcattttgaaatcggagtttgaagaagaagatccttcaattgaaaataaagatgaaattaaagattaaaagttgcgatacaatataatgcagcagacttttatttcttaattctcaattttcaattaaacaagctccatttattcattaattttaaaatatgacgataaggttaaacaaagttacaagagatttgaacgtaggaatcgcgacggtagttgagttcctgcaaaagaaagggcataccgttgaggctaatcctaatactaaaattagcgaggagcaatacgctatactcgtaaaggagtttagtacagataagaaccttagacttgaatcggagcgtttcatacaggaacgtcagaataaggaacgtaataaggcgtcggtatcgattgagggcttcgaaaagcagcccgaaaaaccgaagtcggaagatgtgattaagacagtcgtacctgaggatgcacgtccgaagtttaaacctgtcggaaaaatagatttggataaattgaacggtcgtaaacctgaaaaggtagagaaagaaccggaacagaaacaggaagaaccggttgtggaacggcctgtcgttaaacccgaagtgaaaaaggagcccgagaagagagaacccgaggtgaaggaggaagaggtggtgacacctcctgtttctgtagtagagcctactccagtggtggttgaacccgtagtagtgccggaacctgtagtggagacgaagccggtagaagttgaaaaagtagtagaagaagtgaaaaaagaagagccgaaggtagtagtagctgcacctgtgaaggcggaagaacataaagaagaagaaaaggtggaaactgcacaggctgaagtaaccccggtagcggaaaaggctccggaggatgatggtgttttcaaaatccgtcaaccggaattaggcgcaaagattaatgtgatcggtcagatcgacttggctgcattgaatcagtctactcgtcccaagaagaaatcgaaggaagagaaacgtcgcgaacgtgaagaaaaggaaaaaatccgtcaggatcagaagaagttgatgaaggaagctatcatcaaggaaatccgtaaggatgattctaaattggcgaagagcggacctaaggacagtgcggaagcggctgctaacaagaagaaacgtaaccgtatcaataaagagaaggtggacgttaacaatgttgcaacttccaactttgctgctccaagacctaatgtacagggtaaaggcggcaatagtaacggtcagggtggccaggccaacggacagggaaataacaacagaagaaataacaacaataaagatcgcttcaagaaaccggttatcaaacaggaagtgagcgaggaagacgtagcaaaacaggtaaaagaaacccttgcacgtctgacaaccaaaggtaagaataaaacgtccaaataccgtaaagagaaacgtgaaatggcttccaaccgtatgcaggaactggaagatcaggaaatggcagacagcaaggtattgaagttgaccgagttcgttacggctaacgaattggcaacgatgatggatgtttctgttaaccaggttatcgctacttgtatgagtattggtatcatggtttccatcaaccagcgtttggatgctgaaaccatcaatctggtggctgaagaattcggattcaagactgaatatgtaagtgcggaagtggcacaagctatcgttgaagaagaagatgctccggaagatttgcaaccgcgcgctccgattgtaacggtgatgggacacgttgaccacggtaagacttctttgcttgactatatccgtaaggcgaatgtaattgccggtgaggccggaggtattacccagcatatcggtgcttataacgtgcaattggaagacggtcgtcgtattacattcctcgatactccgggtcacgaagcgtttaccgctatgcgtgcacgtggtgccaaagtaacggatattgctatcattattgtggctgccgatgataacgtgatgccacagacgaaagaagcgatcaatcacgcgatggctgccggtgtacctattgtatttgcaatcaataaggtagataaaccgactgcaaatccggataagattaaagaagaactggctgcaatgaattaccttgttgaagaatggggtggtaaatatcagtcacaagatatctctgccaagaaaggtatgggtgtggaagacttgctggaaaaagtattgctcgaagcggaaatgctcgacctgaaggcaaatccgaaccgtaatgctacgggttccatcatcgaatcttcactggataagggacgcggatatgtagctactgtattggtatctaacggtactttgaaagtaggagacatcgtattggcgggaaccagctacggacgtgtgaaggctatgttcaacgaacgtaaccaacgcgtcaaggaagcaggaccttccgaaccggcattgattctgggattgaatggtgctcctgccgcaggtgacacattccatgtagtcgaaagcgatcaggaagctcgtgagatcactaataaacgtgagcagctggctcgtgaacaaggtttgcgtacgcagaagatccttacattggatgaattgggtcgtcgtattgctttgggtaacttccaggaattgaacatcatcgttaagggtgacgtggatggttctgtggaagcgttgagcgattcgttgattaagttgtctacggaacaaattcaggtaaatgttatccataagggtgtgggagcaatttctgaatctgatgtttctctggctgctgcttcggatgcgattattgtcggattccaggtacgtccttcgggtgctgccggtaagatggccgaccaagagggtgttgacatccgtaagtattctgtcatctacgatgcaatcgaagaggtaaaggctgctatggaaggtatgttggctccggaagtaaaggaacagattactgcaaccatcgaaatccgcgaagtattcaatattacgaaagtcggtcttgtagccggagcaatggtgaagaccggaaaggtgaaacgcagcgacaaggctcgtttgatccgcgatggtatcgtaatctttaccggaaacatcaacgcattgaaacgcttcaaggacgatgtgaaggaagtaggtacaaacttcgagtgtggtatcagtctggtgaactgcaacgacatgaaggtaggcgatatgatcgagacattcgaagaaatagaagtgaaacagacgctgtaaatatatatagtaaggttataagtgtattataatgttataatatagcagaggtcatgattgataaagaggtggtaatgtggtactgtttgcagaacaccaccttaccaccttattttttatcattcggcaccttctcattataatcagcttatatacgacttattggtttatagcttataacataataaatgtggcaacgattgatataattatccttattgtaataggcgccggagcgattgtaggttttgtaaaaggcttcattcgtcagttggcttctattttggggttaatagtcggtctgttggcagcgaaagctctgtatgcttctttggcggaaaagctttgcccgacagtgacggattcaatgacagttgcgcaagtgttggcttttatcatgatctggattgccgtaccattgatctttgtattgattgcctcgctattgacaaaagcaatgcaggctatttcgttgaactggttgaatcgctggttaggaagtgggctgggagcacttaagtttctgttgttaacgagtgtagtgattggtgcgatagagtttgtggacagcgataataagttaattagtgcaacaaaaaaggaagagtctttgttatattatccgatggaaacgtttgcggggatctttttccctgctgcgaagaatatgacgcaacaatatatattagagaataaagataaagatgcaacaagaacccaataaaatgaaacccaatcagaaagacgaacttgaaaagaagactgataatgagtttgtccggaaatttgcggaggagaaatataaatacggtttcaccacagaggtgcatacggacatcattgagcgtggacttaatgaagatgtcattcgtctgatttcatcgaaaaaggacgaaccggagtggttgctggagtttcgactgaaagcgtatcgccattggctgacgctggaaatgcctacctgggcacatctccgtatccctgaaattgattatcaggcgatttcttattatgccgatccgacaaagaagaaagaaggaccgaagagcatagaggaagtcgatcctgaactgataaagacgtttaataaactgggaattcctttggaagagcaaatggctcttagtggaatggcagtggatgccgttatggactctgtttccgtaaagactaccttcaaggaaacgctgatggagaaaggaattatattctgctcgttcagtgaagccgtgcgggagcatccggatttggtgaagaaatatatgggctcggtagtaggttatcgggacaatttctttgcagcgttgaattccgcagtgttctctgacggctctttcgtgtatattccgaaaggagtacgttgcccgatggagctttccacttatttccgtatcaatgcccgtaatacgggacagtttgagcgtacgctgattgtagcggatgatgattcgtatgtttcttatctggaaggatgtacggctccgatgcgggatgaaaatcagctgcatgccgctatcgttgagatcattgtgcacgaccgtgcagaagtaaaatacagtaccgttcagaactggtatccgggagatgcagaaggcaagggcggtgtatacaactttgtgactaaacgcggtaactgtaaaggagtggacagtaaattatcctggacacaagtggaaaccggttcggcaatcacctggaaatatccttcctgtatcctgacgggcgataactcgaccgctgaattctattccgtagctgtaacgaacaactatcagcaggcagataccggaacgaagatgattcatctgggtaagaacactcgtagtacgattgtaagtaaaggcatttctgccggacatagtgagaactcctatcgtgggttggtacgcgtggccgagaaagcggataatgcccgtaattatagccagtgtgactctctgttgctgggagataagtgtggtgcacataccttcccgtatatggatattcacaatgagacggcagtggtagaacatgaagctacgacaagcaagattagtgaagaccagatattttattgcaaccagcgcggtattccgacagaagatgctatcggacttattgtgaacggatatgcaaaggaagtgttgaataaacttccgatggagtttgcggtagaagcacagaagctgcttaccatctcattggaaggaagcgtggggtgatgttgactttttaatagtaaatcgtaaaatcgtaaatatatcatgttagaaataaaagacctgcatgccagcattaatggcaaagagatattgaaaggtattaacctgacggtgaatcccggtgaggtgcacgctattatgggaccgaatggttccggtaaaagtacgctttcctccgtattggtgggtaatccggcttttgaggtaacaaaaggttcggtcactttttatggaaaggatctgttggagttgagccccgaagatcgtagccatgaaggaatcttccttagtttccagtatccggtggaaatcccgggtgtgagcatggtgaactttatgcgtgctgctgtgaatgagcaacgtaaatataaaggtctgcctgcactgaccgccagtgagtttctgaagctgatgcgtgagaaacgtgcggtggtagagttggataataaactggctaaccgttcggtgaatgaaggcttttccggtggtgagaagaaacggaacgagattttccagatggctatgctggaaccgcgtttgagcatcctcgacgagacagactccggtttggatattgatgcgctccgtattgttgcggaaggagtgaacaagctgaaaactcctgaaacaagtacaatcgttattacccactaccaacgtttgctcgattatatcaagcctgatattgtgcatgtcctttataaaggtcgtatcgtaaaaactgccggaccggaacttgctctggaactggaagaaaaaggatacgattggatcaagaaagaagtaggagaatgacaaatataaaacgatgatggttgaacaacaatatatagaacttttctcacagacggaagcgatgatctgtaagcatagtgccgaagtgctgaatgcgcctcgtgcgtcagcatttgccgattttgagcgactcggatttccgacccgtaagatggagaagtacaaatatacggatgtgagcaagtactttgaaccggatttcggtttgaacttgaatcgtttggctattccggtcaatccgtatgaagtgtttaagtgtgatgtgccgaatatgagtacctccttgtattttgtggtaaatgacacattttataatagagcgcttcccacaggaaatctgccggaaggtgtgattttcggtagtctgaaagaagtggccgagcaacacccggaattggtgaaggaatattacggtcaactggcagatacctccaaagatggtgtgactgcttttaataccgcttttgcacaagatggcgttgtcttttatgtgccgaagaatgtggtggtggaaaaaacaatccagttggtaaatatcctgcgtgcagatgttaactttatggtgaaccgtcgcgtactgattatcctggaggatggcgcgcaagcccgtttgctgatttgtgaccatgcaatggataatgtgaacttcctggcgacacaagttattgaagtatttgccggtgagaatgcggtattcgatatgtatgagctggaagaaacacatacaagcacagttcgtatcagtaacctgtatgtaaagcaagaggccaacagtaatgtattgctcaacggaatgactttgcataatggtactacccgcaacacaaccgaagtgttgctggcaggagaaggagccgaaataaacctttgtggtatggcgattgccgataaaaaccagcatgtagacaatcatacaagtattgaccatgccgtaccgaactgtaccagcaatgagctgttcaagtatgtgctcgacgaccagtcggtaggtgcgtttgccggattggtactcgtgcgccccgatgcacaacatacgaattcccaacagactaaccggaatctttgtgctacgcgtgatgcaagaatgtatacacaacctcaattggagatttatgcggatgatgtgaaatgttcgcatggagcaacagtaggccagttggatgaaggcgcattattctacatgcgttcgcgcggtattgcagagaaagaagcccgtctgctgttgatgttcgcatttgtcaacgaagtgatcgataccattcgtttggaagcgctgaaagatcgtttgcatctattggtagagaaacgtttccgtggcgagttgaatagatgtcagggttgtgccatttgtaagtaaccactaaaaaataatgaacgtggatattcaaaagatacgtgaagattttccgatattgagccgtacggtttacggtaaacctttggtttatttcgacaacggtgcgacaacacagaaaccccgtctggtggttgatgcgttggtggatgaatattattccgtcaatgccaatgtgcatcgcggcgtacattatctttcccagcaagctacggaactgcatgaagcttcccgtgaaacggtacgtgagtttatcaatgcccatagcacgaatgaagttgtctttacacgcggaacaacagaaagtatcaacctgcttgtttccagcttcggcgacgagtttatggaagaaggggatgaagtgattgtttccgtgatggaacatcatagcaacatcgttccctggcaactgttggctgcccgtaaaggaattgccataaaagtcatcccgatgaatgataaaggcgaacttctgctggatgaatatgaaaaactattttccgaacgcacgaagatagtcagcgtagttcatgtatcgaacgtactgggtacagtgaatccggtgaaggagatgatcgcaacagctcatgcgcatggtgtaccttgcctgatagatgctgcacagtctattcctcacatgaaagtggatgtacaggagttggatgccgattttctggtattctccgcccataagatatatggtccgacaggtgtcggagtactttatggaaaagaagaatggttagatcgccttccaccttatcagggaggaggagagatgattcagcatgtctctttcgagaagaccacttttaatgaacttcctttcaagtttgaagccggtacgcccgactatatcggaactaccggactggcaaaagcccttgattatgtgaacggacatggcattgaacagatagccgcccatgagcatgaactgacaacttacgctttgcaacgtctgaaagaaatcccccatatacgtatattcggtgaagcagccgaacggggagcggtcatttctttcctggtgggagatatccatcatttcgacctcggcacgttgctggatcgtctaggtattgccgtgagaacagggcatcattgtgcacaacctctcatgcaacgtcttggcatagaaggaactgtacgtgcttcgtttgccatgtacaataccaaatcggaaatagacactttggtggcaggaattgaacgtgtcagcaagatgttttaaagatatgagctgctattcctgtggagtagcggctttttttattctttaactaaaaaaagagggcctcgagtgcagtgatttgagctttcgtgcgtctaataggtaaagaaacaaaatgttcattgaatatcaggagggtcgtgagaccatgcttatattatataaattctctctctttaacattaatgcagctatatcgtaaaaagttacggtgtagctgcaacttttttagagacttcctccgtctaatagaatagttgtaaccattgaaacagctgttgcgattgaagatgaattgaatattattgtatgtaaaaagaaaggggaaacgctgataacagcgaatcccccttttttatcgattatttccttcctttttattcagcagtcagctcaattacgcggctgaaagcctgatttgttgtgaaagcattgattcccactttcatcagataatctcctgaataagttttctcattggcagccagattcgatttggaattcggcatcaggttgatttctttcaccttatacattttcttcgcatccagtccctgaagttttaccgggagcagtttctcaccgaaacgtgggtggatatcgtaggtataaagcacagctttgttcttatccggtgaggcatacatgagagacatgtgattgccatcgtagggagaaaccaatctgtattgatcgccgtccagaatcacttttttcagacgcgtccagttggcaactgcattctggcagtaagtctgttcgtctgcattcagttccttcagtccaaggtcaaagcccagtttgcacatacttgccacatccgtacggaacttcacgcttgtgttcttgttccagctggttacgtgtgcacacatggcttttgccgggaagatttgtgagaatccccactggataaacagacgttctatcgggtctgtgttgtcgctgcaccagaattctgtgtaatatttcagagcttcgtagtcgcaacgggcgccaccgccggagcagagcatcattggcacgtttggatatttgtctttgatacgtttcaatacattgtatataccacgtacatggtcgatataaagctgtccctgtttattttttaaatatggagaataaacatttgtaattggagagttacagtcccatttaaagaaagccacttccggattctctgtcaggatcttatccactacaccatatacaaagtcctgtactttcggattgctaagatcgagtaccagctgattacggtaataatatgtttcgcggttaggcagttggatagcccagtcgggatgtttttcgaacaactcacttttagggttaaccatttccggttcaatccagataccaaatttcactccggcttctttggcagactgtacaagggcaggaataccgcccggcagtttggatctcatcacttcccagtcacccagtccggcattgtcactgttgcgtgggtgcttgttgccaaaccagccgtcatccagcaggaacatatctacaccaagatgtttagcttccttcatcagttcggcaagcagttcctcattgaatttgaagtaagtattttcccagttgtttaataaagtcatacggtcgccttgtccgtctttcagctgatagttgcgtgcccatgcgtgaaggttgcggctggcttcgcccgtaccgttgttgctgaaagtaaagatgaattcaggagttgtaaacacttcattcggcttcagttcataatcagatgcataaggattgatggcggggattacacggaggttacctacgttgtccacttcgaaagtgaactggaagtttcctgtccatccgatagtacctagcatggcacgtccctgcgcttcctgtgccggttgttcaaaaccaagctcaaagaacgggtgggtgtgcatggcagcacggcttcccagtttggtgtcgatcacctttttaccgaacaacagaggttgtgtgctcatttgtgcttcttttgcccaatcgctactgaattctgtcaggtaatattcgtttccggagaaataaagcatggtggaagcataacgccataaggtcacaggcttcttttcagcatgtttgatttcgctccacgtcttgatgacgttttctttcggataagcgatgtaatgcagtgtgacttctaccggatactgattatcttttagttgaataatcgtttccgttccgcccgctactgccttctgctcggaggatatatagcggagaatcgtactcgggttcccgtcattgtgcgtgatagctacagccggttcaaaataatcttcggcgccggagcccggatatacttcccatccgcgggtggatacgctaccgtcacttcctccttttacgtaaggagaaaagttgttgatgtctttctcgttcagtaacttatcgcccagataagcctgatagagtcgtccgttaggagctacttggagaattaagtctgtgttgtccgttgcgatgcggataacgttcttttcctgggcgtccacttgcgccagggtaaacaatgccataagtaatacgaaaagtttcttcatggttttttaataattaattaggtattagttagtttgtgggcatagaatgccgcaaagataattataattcgtcaggaatgaactagaatttaatgcttgcgctaaattctacggtaaatgggcgtaaataatttccactcatatagttgcctgcatactgggcagcttcttctttggtaatcagttccgaaccgttgatggttccgctggcccccttctgattcaggaagttgatgactgttgcccctaaagaaagatgcttgtttacattccagttgatccccccgaaagtttcccagcgaccgttgaaatagagggcttcctggagattggcgtaagtcttgccgaaatagcggaaactaagccaaaggcgtaagtccttcgtgatattatagcttgggtcgagttcgacaagaatctgcggaatctcttttacaatcatcccattggcgttgacagacatttccgaaccatcgttgaatgtgacgcttgcgttatagttcttgtaaacaggtttctgatacgtgaacagagcgtgcaggtgaaaacctttgaacgggtcgatttcggcagatgtggtccatcccagtgttttgatattataaataagcaatacggtctttccttcttccgttcccggtttcgtcaggttttgctggtcaatattattagatttagagatataggtaaccatagaggtgaggttgatccacttgttcttgtagaacaaaccgccacggattaacggtatggtgacacgtttgtattgctcttccgtaggacctgttccggcatattcgttgatacgtgggaagcgggtggctactgttccgtcggcagtcaggccgaattgcccggttacgttgtaagcggcgcggagcgtggcggcatagttcagtttatcctttaccactttggcgggatgaatgctgcgttgtgtggcaatgatatttcctgtttcttcctctttgctataagtggtaaagtcgccgatgcggaaacccgggaaacgggaagcggatatttgatcggcactcatccggtaatattccaggcgtccgccataatagatattgaattggggagttacttgccagttgtctgtaaagtaaagggcgagtttattttcatatccctttgtatattcgggactaagttcgttgtacccgtatgtctgtacgcgctgaccggtcagggtggggtccagggaacttgtagttgtggaagtcagcaactgtggatagttctgtacggtggccatccattgcagagaagaggaataataatcaagatggtaataccattcgttcactcccagacgcagatcatggttgccaaaggtcttgtttagctcgtaagtgattaggaagtttttcactttgcctacgtgcaaccaggtgcggtgaccttctgccagtccctcatacggatcaccgtttgataacgtaaaaccatcgttggcggttacttcgctgatggtgctgcctccgaagtcgacatagttggcacgtggagcatccatatatttcagattgaatttccatagcagatcgttcctgaaacgataatcggagatcaatgcaatctcattggcacggttttcagaaccattgcccaagttccatgttttcatctttccgtctcttacgtccatgtatgggaaagaaccgttctgcggaacataagaatttgttcccagtttgaaaccgtctatctctttaaccgagccgtcgccgacatagataaaaggagctgcattggcatagctggccggattttcactgcgggagtgtttgtagagcaaagatattttgccgcgtccgttgttgaagagacgggtcaggccggcatgataaatctctgtgcggtctgcatagttcgtaaattccaggtcgaaacttcccgggtcgaagttctggtaaatgcttgccgtgtaaagccattggtcattgatggctcctgaaacattgaagtcgaagttctgcataccgaaatgattggtgcggtagtttaatataccttggaaatccttttgtcccagtttgctgaatgagttgacggagtaagcaatattaccggtcgtgatggccgattcggaaggagataaaagtcctacttctcccaggctgctgtcgctacgccaatgagcggcaagtttgtgaacggtagaggaatatacggcaggaagtccattctcatagacattaacgtcctcgctgggaagtccgatttgaatttcgcggggtttgttggcgtcagaagcattcagcatcacattgcgttcgccttcttctgattcttttttagtagagttggcaggaatcgtatcctgcttcatttcggttcggttcgtctttttcttgttcacctgaatgttcgctgcattcccgttggaaggaatcagttgcaacagggttgctagagtaaggcaactaaaggttacttttttcatcacttgtattcatttaaagatttggaagttcacatcggttgtgtcattttgacgaaggcaaagataggaggaggagaaacaagtggctatactcttttttgtcaagatgtgcaagagatgtttcaagtgtgcgatagccctttgcagtgcgacatttattgccatccgtgcaacaaatgtttcatccttcctatgcatttagcgtaaaaaaaactatatttgtcgctatctaatatctgtgtatgaaaaggaaattgctgctttttctcctttctatttgttttttccttccggattttgccgcgacgggacagtataactttatccgtgtagatggaggaagcggtctttcgaacagtcatgtcaagtccattattcaagatagttacggttttatctggctgggtacgcgcaacggtcttaatcgttatgacggcgtgtcgatgaagctttataactgctatgacgaaactttgcagcatggcaatcaggtcatatccgctctttttgaggataatcaccgtcaattatgggtaggtacggatgatggtgtttatattcaggagcttgctaccgggaagttttcgttctttgatgcccgcacagagagcggagagcaaatcagatacaactggattgaagatattctggcagatcattcaggaaatatctgggtgaatgcaccgaatcagggagttttccgctatcaggtggagacgggtaaactgttccgctatattccctgtcccagtaaggataaaagcaaggactttccgcagtctatctgtgtagataaagaaggtacggtctgggtgggtacgtatggagcgggaatttaccgttacagtccggagcaggataagtttgtgccctatgcaacagaagcccttaaaggggatttcatctttactctgtgcgattatggcgatgaactgattgtcggagtgcatgaagaggaactgaaacggttcaataaaaagactggagaagtgagtatattccctgcgcccaaagtacatcgaaaaattatccgctacgctgtttgcttcggagacgagctgtgggtgggtacgcagaatggcgtttatgtgattaatgagaaatacaacagtgtgcaacatattcctgccgatgccggagggaagtatgggcttggagatgctatcgtcgataagatttatcgtgatcgtgaagggggaacctggatctgtacgcaatttggaggagccagctatctgcctgtacgtacgctcgatttttcggtttatcttccgggagcgcccggtacagtcagcggacgacgcatcagtgaattggcggaaggaaaagacggagtggtgtgggttagtacacaggatggcggtgtttgctactggaatccgggaacacagactttcactaaaattccccagtcgcctgaccgtcagaatgtattaagcctgttcgcttcggatgatttggttggcgcaggttactttaaagggggcatcgacctgattgttcctcaagatcaggttcagacgttctatcccgcacaacttggtatcagtgaaggttccgtgtttgccctttaccgcgatcgtgggggagcaatctggttgggtgatggctggaacatcttccgttcggccgacaaaggacagacttttgagaaaatggagcaattcgggtatgcttatatgcgtgatattctcgaagataaatccggcaatatatgggtggcaacgatgggtagtggaatattccggtatcatccgcagacagatcagatggtcagctataaatgtataccgggggacagcacttctatcggaacgaatgaagtgacaggtatttcggaggatagtaaaggctttatctggttttctacagaccggggtggattgttgcgttttaaccccgaaaccggaagattcaggacatacaccaaagcggacgggcttccggacaacgtaacatataaagtcgtggaagactggcaacatcgtatctggttcggaacagaccgtggactggtttgtctttatccggaaacagacagcctgcaagttttcaaccgaaatgacgggttacctgataaccagtttaactataaatcggccttggctgcctctgatggtactatttggatgggaactatcaatgggctggtctcttttaatccgcaaattgtccatccgaatacttttgtgcctccagtctatatcaccgaaatgtacgtgcagggacgtgaaactcctttcacggcagatggtgtgcaactgccttaccgttctaacgtcagctttgattttgtagctttaagttatacctcaccgggtgcaaatcgctatgcctacaaaatggaagggatagataatgactggaattatacatctgatgtgcatacagcgtcttatgcccagctcccgccgggagactacctgttccgtgtgcggggcagtaataataatggtgtctggaatcaggaagaagctactttatcagtgcgtattcttccaccttggtggcgtacagtgtgggcttaccttatctatatcattgtagtgtccggcagctttgtcttgactcttcgcgcctatcgccgccgggaagtacaaaagatccgtgagcagcaattattggcagaactggcgcgtgagcgtgaatcccatcgtacgcatgagatgtttattaatcagatcacttacggagcttgtactccgcaagggggtgcgatgtcacgggctgatgaacaactgatgtcccaactgatagccaaagtgcgtgagaatctttccgacgccaattataatgtagaagcattggctgcagccatgaatatgtcccgctccagcctgcatcgtaagattaaggcgctgaccgatctttcttcactcgactttatccgtatcatccgattaaaacgtgcggcagaactattgcaggagggagaattgcgcatcaacgaaatctctgacagagtaggtttccagtcgccttcttacttcgcaaagatatttcagaagcaattcggagttactcctacagagtttgcccaacaaaataagcagagaatggcagagggttagtaactatgggctattattcgttattttatcatggggtggtgaacaggttttagctcctttcggtactggaatgaactaatcttagttcttctaagatttaattggtaatatgcgatgatttaatattcatcatatatagatttattcgtctgacagttgttgaactttcgtctggcaattgttgttctttcgtctgacaattgtcagacgaaaaagaaacagctgtcagacgaataaattcatgtatcattagccataaccccattaggtatcaaaaataaatctgcacaagctcgaaattagttcatttccgtatagaaatgagggaatgaagtaaataactacagtgtgcccattttgtttaaagagattaaaagatagaataattcagctttataaattctttcttttttacttgcttatttcatttgatttccatacttttagcctccgtaaaccctttaaaaattgatcctatggacaacattcttttctggctggttccagtcgcttccgtgttagccctctgctttgcttattactttcataagcaaatgatgaaagagagcgaaggtacaccccaaatgataaagatagctgctgctgtgcgcaaaggagctatgtcttatctgaaacagcaatacaaaatagtaggttgggtattcttgggattggttattttgttttcaattatggcctatggctttcatgtacagaacgcatgggttcccattgcttttcttacaggcggatttttctccgggctttccggatttttagggatgaagacggcgacttatgcgtcggctcgtaccgctaatgccgcccgtaattctctgaatgcagggttgaggattgctttccgaagcggcgcggtgatgggattagttgtagttggcctgggattgctcgatatatctttctggtatctgttgttgaatgcagtgattcctgctgatgcgctgacacctactcataaactctgtgtgattactactaccatgctgactttcggtatgggtgcttctacgcaagcactctttgcccgtgtaggtggtggtatctatacgaaggcagccgatgttggagccgacttggtaggtaaagtagaagccggaattccggaagatgaccctcgtaatcctgctactattgctgataatgtaggtgacaatgtaggtgacgtggccggtatgggagccgatttatatgaatcttactgtggctcgattctggcaacagctgcactgggtgctgctgcttttatccattcggcagatacagtgatgcaattcaaggcagttattgctccgatgttgattgcagctgttggtattatcctttctattatagggatattcgctgtccgtactaaagagaatgcgaccatgaaagacttgctcggttcattggctttcggtacgaaccttagttccgtgcttattgttgcagctacattcttaatcctgtggctcttgcaactagataactggatttggatttcttgtgccgtagtagtcggactggtagtaggtattatcatcggacgttctacggaatattatacttctcaatcttatcgtcctacccagaaactaagtgaaagcggtaagactggtcctgctaccgtcattatttccggtattggtttgggtatgctttctacagctattcctgtagttgcagtagtgattggtatcattgcctcctatctgttggcttccgcaggtgatttcggtaatgtaggcatgggattgtatggcatcggtattgcagctgttggtatgctttctaccttaggtatcacattggcaacggatgcttacggtccgattgcggataatgcgggaggtaatgcggaaatgtccggtctgggtgctgaagttcgcaaacgtactgatgcgctcgattcattgggtaacacaactgccgccacgggaaaaggttttgcaatcggttccgctgcgctgacaggtctggctttgctggcttcttatattgaagaaatccgaatcggtctgacacgtcttggtaatgtagatctgacttttgcagatggaagttctatcaacgtagcaaatgccacttttatcgacttcatggattattacgaagtacacttgatgaatccaaaagtactttcgggcatgttcctcggttcaatgatggctttcctgttttgtggtttgacaatgaatgcagtaggacgtgcggcaggtcacatggttgacgaagtgcgtcgccagttccgtgacataaagggtattctgactggagaagccgagccggattacgaacgttgtgttgaaatatcgacaaagggtgcgcagcgtgagatggttattccttccttgattgctattattgctccgattcttacaggatttatctttggcgttcccggcgtactcggcctactgattggtggtttgagcagtggtttcgtattagctatctttatggctaacgccggaggtgcatgggataacgcaaagaaatatgtggaagaaggtaactttggtggaaaaggcggtgaagtgcataaagcaaccgtagtaggagatacagtaggtgatccgtttaaagatacctccggtccgagtttgaatattttgataaaacttatgagtatggtggccattgtgatggcaggacttactgtggcctggagtttattctaaaaaagcagaagggaaagtaagaaaaaggagacaatacaagtctccttttttaatttgaattacctttgtatcaaaatagaagcgataaatatgttattaccttatttgaacgagaatctgattgaagccggatgtgatgaggccggtcgtggatgtttggcgggagcggtttatgctgctgcagttattcttccgaaagattttaaaaatgaactgttgaatgattccaaacaactgacggaaaagcaacgttatgcattacgcgaggtaatagagaaagaagcgattgcttgggcggttggcattgtgtcaccggaagaaattgatgaaataaatatcctgcgggcttcttttctggcgatgcatcgtgcagtggatcagttgaccacccgtccccaacatttactgatcgatggtaatcgtttcactaaataccccggtgttccccatactacagtagtgaaaggagacgggaaatatctttcgatagcagcagcttcaattttagccaaaacatatcgagacgattatatgaaccgtcttcacgaagaatttccatattatgactgggaccacaataaaggttatccaactaaaaaacatcgtgccgccattgccgaacgtggcactactccttaccatcgcatgacgttcaatctgttgggagatggccagttgactttgagcttctaaagtcgctttgtttcattttacacacattttctacatttttttgcagaataagcacgattttgttacggataaccgtgaaattgttccgtttaggctaaaaaagtgttgcctagtgcttttatttgttattgaaatgctatatctttgcgaacaataataagaattaaaaagtttaaaatcatggcaacgaacaagctattatggtcttctaagctcattggggtattttttattatgttggtttgcactctttctgcaaatgcacagtttttacgtacttcctatttcatggaaggtactcactatcgtcaacaactgaatccggctttaacaccgactaaaggttactttaaccttccagtgatcggtgctgttaatgcaacggttggttctacttcgttaggctatcaggatatcattgatattattgatgatggcgatgatttctacaccaaaccggatttcatgaatcgtctgaaagataataataaattgaatgtgaacttcagtacagaaattctttctgcaggatggtataaaggaaaaaacttttggtcattcaatatcggtcttcgtacagatatcggtgctaacctgacaaagaatatgtttaccttcttgaatgagatggaaacagttgaagaaaactggagaaatagtaactatgatattagtggtcagcaattgaacattaatgcttatactgaaattggtttaggactttcacgtcagattaatagccgtttgacagttggtgctagagtgaaagctttattgggtattggtaacatggagttgaaacttaatagagttgcaatgagcgctaatttacctagtgatcaacaaataaatcagtggtcaagtgagagctattggaattctatgaccccttcacaggcagcacaggcagcacaagaattaaaggataagtttaataactatcatgcaaacttgactgttggtgccgaactgaaaagttctttcaaaggcttggaattgcaagaagaagagggtaaagattatgtaactgactttgatttcgatagcggtaaattgggtatagctgggtacggttttggtatcgatttaggagcttcttataaaatattggataatctgactgtatctgcttctgttcttgacttaggttttatctcttggtcaaaatcaagtacaaagattgcatctgctaatccggatccgattgatattaaaggaagtacctatgcaaatatggttgatccgaataatccgaatactgttatgaacgctgtaaatcagttgcagaatgacgctcaaggatatatggaccgtgtaacaaatggtgatgtacttgactatgacatgttgcaactcgaagtaagcgatgctaaagaatctcgtaaatctcgtcttgcttctaccctagtattaggtgcagaatatggattcttcaataacaaattagcagtgggtgtattgtcaaccactcgttttgtacagcctgatgctcttacagaattaacattctctgcaaactaccgtccgaaaagctggttcaatgtagcacttagttactcagctatccagtcagccggtaaatctttcggtctgggtctgaaattaggtcctctgtttgtcggaactgactatatgttcttaggcaagaactctaactctgtgaatggattcgttggagtttctattccgttgggcggaagaaaagcaagtaaagaaggataagatattttaatttctctctctaaacattctcttttaattaattctctatagaataaaaaacgtataatttacagcttaccgtcttagaatcctctaaaggatcacagatggtaagctgttttttgtattagaaccattttatcttccggaatatcacaaacgcaagagttgacaatccgatggaaaatagtacgatcaaagagaaagcaaagggtacctcttccagatgaatatccacattcataccatagaaactggcaatcaatgtcgggagcatcaggacgatggacagacttgtcatgcgtttcatgattgtattcacgttattggagataatggaggcaaaagcatccatcgttcccgtgagaatgtcactgtaaatattcaccgtgttaagtgcctgtttcaattcgataatcacatcttccactagttcagtgtccagataatccgtatcctggaaaatagtccttaattttcctatcattacttcatttccacggatggaagtattgaagtagaccaatgttttctgcagtctcatcagccggagcaggtcctcgttgcggatgcttcgttccagttccttttctgcggcgctgatgtctatgtttatctgctttaggtatttcaggaaccatacggcagaagaatagatgatccgaaaaatcagatccagcttgttgcgtacaacaatcccttttcgacgggtatgctctatgaaatccggtagcaaatcggtgttgtgataacagacggacacaataatctcgttattggtgattattccaatcggtacagtgtcgaagggcaggctgccgttctgcttgttctgcacagggatacgaagaatggtcaataaccagttaccttccgtatccgtacgcggacgttcgtccgtatcggctatgtcattaagaaatgattcgggtacgttgagagtttgagttagaaattcaaagtcatcattatttgggcatactacatttacccagctgttaggaagccattgagctttttccacaaagccggcttcacaataaagatacgttctcatcttattgcctcctttcgtttgttttacacgagcagaggcatcaggtttcaatgactctgttcgctttaattaatactagttgtgcacgttcgcgggtttgaatcgtccatatttctatgattttaatttaaaagcgatgcaaaggtacggaaaaatgaagagggttccgccctttgtatcgctttttttgatattcttttatttgtgccctttatttagaggctccgatcctattctgcttttccttcgaaatgattatccagatatttcctgatattgtaactgcttaaacgctctttggatatgctgccatctttttcaacaagttcatagtgtggaataccattgaactggaatagttgacgcagataattgaactctgcctccgaaacataataacaggcttctccttttagattcttctctatatattttttgtagtctttctcgggcgaatctttctgacttgtgatatagatgaattgaaactccggatgatctttatattttttgcgtaaatcggcagttgcctctattcctgcacgacaagggccacaagtcgttgcccagaaatcgacaaacagaaccttacctgaatgattctttatgatgttgcggaatacttcagtcgcttttccatcaggcaactgataagatcttgccctatctttcgggtgtgtcttttccagcactcgttcagcttctgatgcgagaaacggttcggtgaatatttgtttgatgctatccacatattcatgagctatttggctgtctttgatatttcctaaattaaaattaaggctccgcactttggctatttgccagagcaaagggttgggagtaggatataattgtgcaatgatggaatctttcttgaaatcatatttctggttcatttttataaagattttatccttatcctgctgggattcttcctttttctcggaatataatgccacatattcttgtatgagtttttgttctttttcatagagcgatgccatcttctcgttctctgcaattaactgcctcattataattttggcagtagttccggccaacttctcctgtctaagtcttattgcttcctgctccttatttagtttcacacctttttctttaaggaaagtcaatagaggtttcttcggataagtataatcaatgctgtctgatggagaaaaagactggtcggaatatgctttccggaacaggtccatatattcgaaacggttgataaatgtacttgcgtttgtgtttgcaagtacggttacatcattgagtggcatatctttcaagaaactgtaataggaatcgtcttcctttactttcagcgcctgattggtgctatcttgctttgcgtaataatctctgctcatcaagaaatcaaaaagcatacttccggcttgcaaatctaccttgttctttatcagatgaactgccttgagagagggctgatagatttggcttacagagtctgcaacctgtttccattgtgcaatgataggcttcatgtgctccttgtattggtcgggagttaatgtcttttgtgatttcgataagtcctcatagcgataggttatcaggttatcaaagtctttcagcaggtaggagagagaggcggatggacccatatatgctgtgttcctgatagggaagtaatgatcgcgtgcacggctgcgtgccattacagcttcccagtcgatatacatggtgagagtttgtccgggttcaatatagaatggaatccagttgtgtcctagtactaccgatgattctatcggatgattaatgataaatcgacagctaaaactaccgttcggggctatctggatgacggtcggataatcttcacgggtcagttcatttgacagataaataagaccggtgtcaaatcctaaacgaggatcgtatccgtttatatacccttgcagataagttgaatcctggcggaagaattgcttaaaatcaggttctgcagcaacctgtgtaatcggagttctctccttgctgtacactaattcttccgctcctttctgctgaatcttacacgtgccgtctttttgcggggtgaatgataaagtcatttcctcctgactctctctatcttttaaagtcatttcaatccgctttcccttttttcggatattttcattgatgtatatccggttattcagaatgctgatggagtcgtaaactccatattcccatgaaccggaaccgtctgtcttgaaccaattgcatttgatggtggctagtggagaagaatctttcttcttttgcaggactagcgatatgtcataaatattgccttcgggatcagtaggattgagaaaatgaatggtctgtgtttctgacggtaacggctcgaaaaccagcacataatccattgttcctgaatccggcatatagacttcttttttgagttcgataccttcagcacttttgaacagatatttcttgccggttgcggcatcttccagataggtatctccatcctccatgatccaccagtgcgggcggaagatagcatgaatatatactcttgtgttctcgggagtgcgctctatgcgggtgatgttggaaatacttcctgatcgggctttgaaaggaggatggtcgattgtttgtgcggatactatacccgataacaaaagtaagatacaaaataaagttgttttcataataatagtttttcgatcaacatattgaaagtaattttacaaagtaagaaaaatattcatagcctggtgcacttctgccctgtaacttaacatagattaaacgtttacgtaaccatcttttttgtacctttgcgcccgaaaatcagagtgataatttaaatattgaaatattatgagtaagaaagcccttttaatgatcctcgatggttggggattaggtgaccaaaagaaagatgacgtaatcttcaacactcccactccttactgggattatctgatgactacttatcctcactctcaacttcaggcaagcggtgaaaacgtaggtttgcccgacgggcagatgggtaactcggaagtaggtcacttgaatatcggtgccggacgcgtagtttatcaggatttggtaaaaatcaatcgtgcatgtgctgacaatagcatcctgaaaaatcctgaagtcgtttctgctttctcttatgcaaaagaaaacggaaagagtgttcactttatggggctgacttctaacggtggcgtacacagctcactcgttcatctcttcaaactttgcgatatcgctaaagaatataatattgacaatacatttatccattgcttcatggatggtcgtgacactgacccgaagagtggtaaaggctttatcgaagaactttctgcacactgtgagaaatcagcaggcaagattgcttctatcatcggccgttattacgctatggaccgtgacaaacgttgggaacgtgtaaaagaagcttatgacctgcttgtaaacggcataggtgagaaagctaccgatatggttcaggctatgcaggagtcttataatgcaggtgttacagatgaattcatcaaaccgattgtgaatgccaactgcgacggaacaatcaaagaaggtgatgtagttatcttcttcaattaccgtaatgaccgtgccaaagagttgactgttgtattgactcaacaagatatgccggaagcaggtatgcacaccatcccagggctgcaatattactgtatgactccgtacgatgcttctttcaagggcgttcatatcctgttcgacaaagataatgtatctaatacattaggcgaatatcttgcttctaaaggcttgagccaacttcatatcgctgaaacagaaaagtatgcgcacgtaacattcttcttcaatggtggacgtgaaactccgtttgataaagaagatcgtatccttgttccttctcccaaagtggctacttacgacttgaagccggaaatgagtgctttcgaagtaaaagacaaattggtggctgccatcaacgagaacaaatatgatttcatcgtagtgaacttcgctaatggtgacatggtaggtcataccggtatttatgaagcaatcgagaaagctgttattgctgtagatgcttgcgtgaaagatgtaatcgaagctgccaaagcacaggattacgaagcaattatcattgccgatcatggtaatgctgaccacgctttgaacgaagacggtactccgaacactgctcactctttgaaccctgttccttgtgtttatgtaacagagaacaaaactgcgaaagtagaaaacggtcgtctggcagatgttgctccgactattctcaagattatgggtctggctgctccggctgaaatggacggaaacgttttgattaagtaatttaaatttctataattgggagggcggagtagaactccgccctttttgtctcacataaggtttaaaatgatacaaataggtgatgtagtagtgtctcttgatgtatttcaggagaagtttctttgcgatctgggtgcctgcaagggcgcttgttgcattgaaggtgatgccggtgctccggtagagctggatgaggtgatggagctggaagaggttttgccggttatctgggacgaactggcttcggaagcacgtgcggtgattgaaaagcaaggggtggtatatacggatcaggaaggtgatttggtgacttctattgtcaataataaggactgtgtgtttacttgttatgatgagaatggttgctgctattgcgcgatcgaaaaggcctatcgagagggaaagactgccttctataaaccggtgtcctgccatctttatcctatccggattggagattacggaccttataaagcggtgaattataatcgttgggacgtatgcaaagcagcggttttgctgggaaaaaaagagaatcttcccgtatatcagtttttgaaagagcctttaatccgtaagttcggtgaagaatggtacaaagagctggtcactgttgccgaagaactgaaaaagcaacagtacatttaaattctcttccggttcttgcgtatgcaatatacctgatatagtaaaatacacaatgcgataataattccgcatgccggtatcatccatacttccggatgaataataatcaagaaaatacaagtggcgattacgcaggaagtcaatacaataagaaacaacctgatctttgcaaataacggattaggaacagtagttttcattttcatagttatgttttctttgctttttatgcaagatagtgattttgtatggaaaacgtttctgctgttaggttttattaagagatggacggttgatcgatttgaatatgaaagcccctttgggcaaaagaaaaacaccgatcgaaggatgttccttcgccatcggcgtttcctcgttgtaagatgtgaggttggtttataaaacgtaattatttaattatgtatcgatatttgcatacgttgcattctcttcaataaactcgcggcgtggccctacatcttcacccatcaacatagagaagatataatcagcttctgcggcgttgtcaatatttacttgtttcagcatacggttttcggggtccatggttgtttcccacaattgctgggcgttcatttcacccaaacctttgtagcgctgtgtatgaattgcattttccgaaccgccaccgtaagtgtcaataaacttctggcgctgtgcatctgtccagcaatactcttctactttaccttttttgcagaggtagagcgggggagtagcgatgtacaaatagccattctggataatctgtggcatatagcggaagaagaatgtcataatcagtgtgtcgatgtgagaaccatcgacgtcggcatcggtcatgatgataatcttatgatagcgcagcttctgtatgttggcttccttgctgtcttcgtcagttccgatagttacaccgagagctgtgtagatattgcggatttcatcactttccaaagccttgtgatacatggctttttccacattcagaatcttaccgcgtaatgggaggatagcctggaacatacggttacgtccctgcttggcagtaccacctgccgaatctccctcgacaaggaataattcacattttgaaggatccttatccgaacagtcggctaatttacccggcagaccaccacccgacatcggcgatttgcgttgtaccatttcacgggcttttcttgctgcgtgacgtgcggtagccgcgagaatcaccttgtctacaatcgtttttgcttccttcggatgttcttccagataatatgccaatacttcacccactgcttggtcaacagcacccatcacttcgttgttacccaacttcgttttagtctgtccttcaaactgtggttcagctacttttacagaaataacggcagtcaaaccttcacggaagtcatctcccgagatttcaaccttcaccttttccagcatcttgctgtcttcggcgtatttcttcaacgtacgggtcagcgcacggcggaaacctgccaagtgtgtaccaccttcgatagtgttgatattgttaacgtatgagtgaacgttttcggagaatccggtattgtacatgatagccacttcaataggaattccctgtttttccgagttcagatagataacgtcgttaatcaagtgctcgcgtgaagactcgataaaacgtacaaactctctcaaaccttcttctgaataaaactgctcacccttgaagcttccgtcctcgttcacaacccgacggtccgtcagggtgatgcggagaccagcgttcagataagccaattcgcgcagacgtgaagccagaatcttgtaatcgtataccgtttctgtaaagatggtattatccggccagaattgttggcgggttccagtgatgtcggctgtaccgacttcttttacagagtaaagcggtttaccgatctcatactcctgctgatagattttaccatcgcggaatacttgcgtagtcatgtgggtagacagcgcgtttacgcaagacatacctacaccgtgcaaacctccggataccttgtaagaacccttgtcgaatttacctccggcatgcagtacggtcatggcaacttccagtgccgacttcttttctttctcgtgatagtccaccggaataccgcgtccgttgtcctgtactgtgattgaattgtcttcgttgattgttacttcgatgtggtcgcaataaccggccaatgcttcgtcgatagagttgtcaacgatttcgtataccaaatggtgaagtcccttgacgctgatgtcaccaatgtacatcgcagggcgttttcttactgcttcaagaccttccaatacctggatgctatccgcagaataagacccgttattgggagtgatttgttcttcgctcataattgcctttctaactttaataacagagcaaatatagtgaaaattgtcgacttggcgaagaataatcagtgaaaaataaagaatgcgggttgattctccactttcttgataagtttgatattcagttggttataaacaagaaaggccgaacttaaaagttcagcctggatgctatatagaattgttaaattcttattattaagcgagcttgttgatgtaaagagccaacttagatttcagattgctagctttgtttttgtgaatgatgttcactttagccaacttatccaacatctttgtaatgcctgggtacattgcaactgcttctgctttatcagtagttgcacgaagctttctaacagcatttctcatggttttgccataatatctgttgtgaagtcttcttgtctcttcttgtctgattcttttcagtgatgatttatgatttgccatctcgactaatctatttttttagttctttattcttttaacttgtagcccgtgggggaatcgaacccccctttcaagaatgaaaatcttgcgtcctaaccgatagacgaacgggccatcctttgttgcatttctgcattttgctttctcgaatctgtgtttgtttctcgattgcggatgcaaaggtaggaacttttttgaaactggcaaatgatttataggaattttttcattgaatatgtgttttttttcaaagtgaccattcttttatgctgatattcaataaaatagacggtttcagtttttataaaaaaaatcttatcagtgaaaaaaaactggaaggtgttctcttccatataccttattatattatagtggaataaaaaggctgcttatttttgtgatttctcttgtaacaaaaaaagtgcattctctcctcgcttggacagaatgcactaaacacaaacaaaacaaacaattttaataaaacgatattttctttgaaaaaccgttttattaagacgctacatgtagtgggaaacattacatgagcagagggcaaaagagcccactagggtacttcgcagtagcctttgtaaatacatctcacctaaatattgttcacatactatttcgtcacacgtttttaagactccagttcggagttgttcaggcgtataatccatccgttaacttgcattcttgggcatatatgcggaattccggtatctgatggctggataaagaacaaaagcgtatatgagtcctgacggtcgagatactcctggtcactcatttcacctatatcattgtagattttggataacaacagatattgagtgagtgggagacgaagaatgttctggccgcttggtatatgtttgatcgataaggttgtctgatctcctttcatgatacgtaatgtatttaatctcgcatggatgaccggagtttgctcggacattacagccacttccttctggtatggaagatagtagactggagttgtaccgaccggtgtgtttgtgtagtctattattccgttggcagattccagagtaaaggaaaagtcctcttggcttagaggggcatttgcttcatcttgaagaatgcatgagaaataattagtatctttcactaaattggcggtaataacctgatatttttgactaatagtaatattttcaaggctactgtaaaagagtgcattcagtttcttgttcgactgattcttattatcgcatgccaatgatatattcagggaccttcgttccgtttgtccagctttgagattagggagctggtacatgtggttggatgtccctccccatataagcaaacgataagttccttcgggaaacggtactcttaccatacagtagccttgatgtaatgtaatgctgtctacgtccactcgatccacatatttatcatccttgtcgaaagcaaggatggtaatgtcgcttacttgtgtggaggcagcgtccacatctagtatattataggtatacgagattttcagccaagtcccggaagggcagtctgacaagtcgtcgttcacccagttgcaggatgagaacaaggcgatggcactgataatatagagtaaaaatggacgcatttataataaatttagttcgggtggccaatacttattcaagttctacatcttgattacgtacggcccacggaaaaacattgaaattgatgtctagttcggctttatattcatccggctgatccgggtcgatgaaaggttcgccgctaccgagtcctgcaattttgttgactgacaatctgtatatattgttgcgtacgataccgaattccatgacacccatttccggagaattattatcaaggtgtttgatccagtaattgtaataacaagagtagttttccgttttcttgaaacgtttgatactatatcgagctagctcttctgttgtcgagttgtcagtgacatcgtccggcaaattattaaggactagtttacggattgcatctacgctggtataaaagttgtaattgaagtagaacatattagtcggccagttggactgattgctaactacatcgccattttcattgaaaacgtggtcgggggcaatatccatgttggctttgaacataactcccgtgctgtatgcattcagttgggcgtcaaggaacatacagttttccaggcagtagatatgtgaccagctgttagcttgagccatgcctgcccagttgccgtcgttgatatccaactgtactagagcttgtgcaaagaaaccgtcggcgtttgtaaagtccccggcgttctccactgttttcttgaagaaataaggatcgataacataaccattgttgtcgttgatatcaccgaagttttcatcagtatatgagtctggttcctgaaaactgttcagtactgctgtatggcggaaagtataaaactgggttgccaagttcaacattctaaaattgttcagtttgattgtacagtaggtctttccggatgggtctgttagtgggaaagtttcttgtgtttgagtcagttcaactttggcaaccacgcgttcaagaccgatggatacactagtcactttatcggagtctgtaggttttttcacttcaacgttcagattggcagctccacgattggtcataacgaaaccgttttcgggtacgcttggaatttttcctgcactgtaagttacggcatcaactgcattcagaaaagcctcttgtgtgctgatatttcctgtgattgcttttccgttagctatggcaaagatgttataagttcccggatttacagtgattttgtcggcggtgtactgtatgttttgaccgctcgtaactgtccggttgatgttcttcagttcctgttgatctttgagcgtttttgtggtcgagtcaaatagataaacagtgagactctttactgcatattcttctttagaaccttcggtggtaacgccggacgattcggcacttcgactggtagcaacgtttggaatctcgaagaacaaggcgagattgccatttgactctgaatgagtatcatcggcgatgacaacatctgcatcattgatgcaactgtactgtgtgactgctgcgaataaaagcagtgacattaatttactgaatcttttcattttacatttggttttaatgagtgtttattttagtgcacggactaattgcagattattatccgcttgtgatagtcctgctttttgagcttgtctgaataagtactctgcttcttcatagttgtttttaagaaagcatagaactccttttgctaatattgtttccggtactttcggagctttttccaaataagtggcagctgtttggacgtctctttgcatcaaggctatgcaggcggcattcaggttggctgtgggattatcgggaaatagttgtacggcagtcatgaaaatctgattataagtttcgcttccaggtgtactggcaagtgcgagacgaaacatttcttcaagactcaaatttttagggtttgtagtaaagactttccgggattctgcaagagtaaacgggcgtacacgatactcaatagtgtagtcggaatgtctaagtagagtaaaccaatgcttcaggacaaaatcgtagaatgcagggaagtgcttttttagctttctctccttgctatcggggtgaatgtcgcttgttatggtttttattatcgcttctttctcttgaaaagtcgtatcacagagaagagcttcaaatccttcccaatcttcaggagtatagtctgtctggatatgcgctccgtcgaatgcatatagctgatttacatactctttcacagattgagtacgttcacgggccaacttctcattgagtcggtaaggtccgtcgggtgaagcgtagccgtgaatgctgatgtgtgtgatggtaacgttggtgtcatttttaatggtgttgattgtttcaataattttattcagttctactgtattgttgctgtacgtttcgtatatagcagtcacattgacaggaaaatcaataaacgcgcaccctttttcttctctgattttcgaggtttccacttggggagtcaagaatacgagttgtggaataggggttggctgtgggtgtaaacgggcgatacaagtgagattttcttcacccggaatcccacagccacagcttttctcaacgagtgagagagtggcatgattcatccaactttcgaaaggtacagattgcagataatgcattgtctgccgacttccgttttttctttgcaatgcttcggcttctttttccttcttgccagcttcgcgcaaaaatatgatgtgttgttttcggctgttgatatagatagctggtaattccaaccggtgttccaaactgtcactgacaacaggtaccaatgtcattgattcattgggcaggaagtcacgggtgatttctatttcaatagaaaccagtaattctttcccggccttgtgcaggctggaggaagtggctcgaacagtgccatcatctcctgttacaggtgtctgtgcctgaagagaaagaaataagatggctgcaatgataaaagttcctcctgttttcataattttataactaaatgacttcttatctgtaacaaaagcaatcataactcaccatggataaattcgtgagatgattccttgctgttgcaatgctttcaatatctttatgtcctttattgatctgctgatgcctccatgccctagataatatactctccatggggtagaatggcattgacgtgctattcgtatgtagatacttcttcttctggagaaccagactttccataaacttttcatcctgttttattttaaaatagataaactaaacttattgaagccttactagaccctatgtaatgataatcacctttgtctcgtaatccggcgcattccttgacgcagttgtactgcttgtagcggataaaatcgtatcctactcccagacttgtttctatattccaatgattatccagcatccagtgatatccggcactgatacctccacctgccagccatccttcatatctgtattttttcaacccggcgaatataccgaaaggcggttttttccctccgatattgaattgtgccccattgaggtaagcaccccagaaaaagccgttaaacttctggcaagtccaatatttatattctggctgtatcagccaatagcggttcacatatttctcttcccgtttccatggtcgcagactgccggtcagttcaactgtacttttatttcctatggcataggagactccggcttcgaaagccccatctattgccggaagcgcattcacgctgactgctactctctgtgagcgacagtggagccaaccaactgataagaataggaataagagtaagaaatatttcattgtgtctgtttgttaaggacgtttattattttcaaaaaatacattcagattgtaagaagcttcttcggaaccttctgtcttagcagcctttaacatgcgaataccttcgtatgtgtttccagtcatcagctcatatacaccccgacaattcttgtaagcaaggctgtcatgaggagccatcgataaaaacttgcttattgattgagtgtctccttgttcgatggcagcagcggcagcgtttaggttggcgatggggtgtacaggatacagtttgacactgatgttaataatttggtaaaacttagctttgttatctgcatacgacagagctacggtatagagttcgcggagcgacaacatttgtggattgacatcagccataatcttagcttcttcaagattaaaattcaactctttctggtttcgtatatctacatcatccgtagccggggaaacatacgaacctttatatttcatttttgtggttgtcatatcagctggagacgtgttttctgctgttgacgtaacctcgtccggattcttttgggaggatgggagtgcagcaggttgagatgtaatgagtaaagtatctttcaacgcttgttcaccttcaggacggatgattgttctccgaaggaggagagttgcgtggttcatccaatcttctgcgggcaacgaagttcggtaagcgatggtgcgggaatgactttcgtcgataccggcaacgaggtaggttgcgttctcttccttatgctcgcttttttttcgtaatatctggttacgcagatataatttttgtttttgtttgccgtttaataagatggaaggtagtaagatttttctttcctgtccggttaagacgggcgttagtctgacggcatttttagactccatattttctatctctaccgatacatccatggagagaagtaatgaatctgcccgcactccgagaaagtgtggagtaatatccagtttaatgttttgtgccgggagtagattgcatatcaataagctgaaaaatatgaatgctttcgttttcattttatgtggttattattaggttgatttatcggatgaaatatatgattgatatccctgcttgtgtaggtccccagtagttgcagcttgatttttccaatagggctgcaccttcagactgtccgtagcgtttataattaaggtgtgcatatccgagtgagattcctgcttccagattccattgagggctgattatccattgataaccgtaggaaatgccgaaacccgccagattgccttgatatctgttgtgagcaatctgcctgttctcaatacccagcattttcccattgttgaatccccaggggagcattcctccaaaattgaacaaagcatagtgtagctgaaagccgataaaacttcctgtgaatacttcattaaaccatttacggtattctggctgcaacaggaaatgcttcatctttttgttccctccgaagttccaggggttgtaattgagggaaaggctgatggtatgcgtatcgtcacatcgcacttctcctcccatattgagagtagtggttagatcgtaaagcagattgcttttaatggctatattttgtccgcaaaggttcgaagcaggcagaatacatgcaacaaaggcaatgatggctagcccatgtttaatgtttgctgcatgtctccacctgttgctggcagcagacttttcatttttgctgatattgggtttgtgtgtcataattatttgtttatgtgtatctgttacttcttaggtaacggaactcctgtttaatgacaggaacacatgagggaaaagtaaaaaagacggtggtcttttattgatatatgtctctggaagctttcggacagaaaaaagtggtccgatgattggcaatagatagttggaacatgaactaaaagtgattcgtgttctcatatcttattttattcttcgaaagaagttgaataaaataatgtataattaatttggaatgtaatactctttttatatatctttgtacagtatttatatccgttacctaagaagtaatggataaggcagattgctgatagatagttgtttatgtgttattgatgacttgcgttgtaagattctacgtaaaaacaattcaattgattggcttctgttcttttcttcaaaccaaaacctttcagataagtttgtgtggtttttatagatttatgtcctagtgattcactgatcatttcaatagggattccctggtatttggcatttgttgcccaagaatgccggatggtatatgaactgacaggtgattttaggtttagttctcttgacaggctttttaattgattgttgaatcggcggagggctgactgatattccttatatatgccttcttcttttcgtctcttatctcctctcattatattaaataggtagtctgggcaatcttctctcggtggattgctgttacgcagcttgtttatctctttcttggaggtgtccaggatttcaagacttattggtgtgcctgtttttatacgattgtatctaaggattccgtcttccaatgccgatttctctaaatgtgcgaaatcagagaacggcataccgcagaattggaacatcaaccgtgcgatagcttgcgtacggattaagtgttgggattgaggggctttgtagagaagtgtatgcagttcgctgaccgggagcgcctttttctgtcgtacatctacgccagtgtatacgtcacgaaacagccgggggataaagcgggctacccctgcttctacaccacgattatagatgctgcgcaacatacgcatataggttgaaactgtgtttggcttcaacccatgttcgtgtaggtgctgcccgtatcgtctcaaactatcgcgagtgatctgcccgaaagttatgctgggagtaccacagaaccttgtgaatgacagaattgcattcttatacacatgtgctgtcgaataacgaccttcttcctgtaaattccggatgtatgctttggcgcatcctgtaaatccgtttttattactttttcgtttcataagcttgtttatctttacttgttattcagggactataacaaaagtagttatcttttttgttgttaatgcctttaaaatctctccgattaccttgtattttttgtagctttgcttcggatttggaaatgaggttattcagttatgctgcagaaaacgaaaggaatagttcttcatacgttgaaatacaatgatacttctatcattgtagatatgtatacggagttgtccggcagagcttctttccttgtaacagtgcctcgttcgcgaaaagcggctgtgaaatccgtacttttccaaccgttatcttttattgagttcgaggctgactatcggcctaatgcaacactttatcgtgtgaaggaagcgaaatctttttatccattttcttccataccttatgatccgtataagtcttcgatggcacttttcctgtcggagtttctttacagggctatccgggaggaggcagagaaccgtccgttgtttgcctatctgcaacattctatcatttggctggacgagtgtggagagggatttgccaattttcatctggtttttctgatgcgtctttcgcgttttctggggctttacccgaacctggaagattatcataccggcgattacttcgatttattgaatgcctgtttcacttccattcgtccccaattacattcttcttatatcaatcctgaagaggccgtccgtctccgtcagttgatgcgcatgaactatgagaccatgcatctttttggtatgagccgtgcggagcgtactcgttgcctgacgattatgaatgattattatcgtttgcatctgcctgacttcccggcattgaaatcactggaggtattgaaagaactgtttgattaattagtaacttttctccattcaactgttctagctagttttcattcttgaaacacgagtgcggtgcttttcaattctgtcgttcccttgtcgtgtcgagtccatttacttgccatatattgttttagcagtgttttagcgtccgccactgtatgcggcaattaatcaggtgataataacacttcttaatgcgggtttgtatgctgttcctgaaaatatatgttacttttgtccgtagagaacaaaagagaatgaacaagagagaaaacaatatgaaaagattcctatacctgacggtctgtcttctcatcctgggggagttttatggttgtaacggagacgtatttgtcgacgacttccgtccttccgattccgaactggcgctggacgggaacggggatgttgccactattcaatttgcagctgccaattgggattggttagcaatgtatacagcttctagtcttcccgttcaatataaagtatatgatgcggacaatcgcttggtaacaaatgaccaaggtccatcgctgaacggattgggaaagattgtgtacaccggagagatgattgatttcaccatcgaacgtgttcatcccgaagaagtgaagataacggtgggcgagaatgccctttccgctccttttcaattcctgctcacggcaagcaacgaatatgagtggcaggagatacacgtcgagatttctccgggagacagatatgtgatggatagtatcatttattctttgaatgcatattcttacgatccggaaaacaagatagagaaaaaagaaggcgtctcctttcataacttaacagatgtttcgtctacatacacgttttttcctttcgagtctttttaccattttatgaggttcaaaagcgatgtgcccgaagcttttcaattactgggcgaagccggtctgacagtggaaataccaagtatgaaagacggatatttagtgatgaacggcaaacgcgcgccattcatttctgagcaacaaatgttgccttgccctagtacggaacagaacaaagacataattcctcctcggacttctcgatactacaccttatcgatgatgtatgattggttggaaacgagatataccctctatgtttctcactccaaaaccaagaaacaacgaatcgtaaccggcacgttgcatagcgaaatgcctgtaaaatattatataacacacaaggatatacctttcaacaactagcatatcaatgattagaaataggaacgccatacggttgctgtgcctcttttgccttctggtatatccggcaatcaacgcaaatctggaagcccagacaatcatcggacaacggaacgacagcgtcagccattccctgatccgccatcagcttggctttgacattcgtccgggctatatcgtctccacccatagttttctgcaaggagacaatatgcagcaaaagaaaatcgaccaatcgctttctttccatctcaagtacgctttcagatttagcaaagaatccaatctcggcaggctctttcctcatacctatcagggcattggcgtttcctaccagaccttctttagtcccgttgaattgggaaatccggtgtcggtatacgcttttcaggggtcacgtatcgcgcaactgtcgccccgtctatcgctcgattacgaatggaacttcggagcttcttttggctggaggaaatatgacgaactatccaatccgcaaaacgtgttgattggctccaagatcaatgcgtacatcaatctcggctttttgctgaactggcaagttcacaagtactggaaattggcggcaggtgtagatctcacccatttttccaatggaaacacgcattatcctaatggcggtcttaatgttattggaggaagaatcggcatcgtacgcactttggacgcggatgaggcgcccggttccatcactcctagacggctctttataaagcctcacgtcagctatgacttggtgatctacgaagccacccgcaaaagaggactgattggagacgatgtgtcgagtatgattcccggttcgttcggtgtggcgggcatcaatttcgccccgatgtataatttcaacaactattttcgggcagggctttctgcggatgcgcaatatgatgaaagtgccaatcttaaggagtatagagtgggcaagttttactcgggcgatttgaagtttcatcgtcctcctttccgtaagcaatttgccatggggttatctcttcgggcagaactggtgatgcctgttttctctatcaatgtcggcgtcggtcggaacctgatatacagcggtggtgatatgaaagggttctaccaaattctggctctcaagacttacgtcacacgccatttgtttttgcacgtggggtatcagttgagcaaatttaaagaccccaacaatctaatgctggggcttggatatagatttcatgataaacgatgaaagggcaatcttcgtttgttaataacctccttttctcaatttaattaaaatgtaagtcctcctaattggattattccattatctttccaaatataattaacttttacttctgtgataccggcgtcaggatatcgttgctgatattctgctgttttatcactctgtaggatatatccgtatcccaatgatattcctgtagcaaatttaaaaccgaacttctctgctttatcgtcatacattaaggttaaaaaggtaatattccattcgtatgtgccttctctgaatattcccgaatcagttttcattgtaaactttttggtttcctgattgaatgtataagtagcaccaatgaatggtttatctttttctcgtaactcaatttctatttctggggggattcttagatccactgcttttattattactcccggataatcagggttaccttttagcggaattccccaattgacaatttccggactgttgaagtatttgacatatacggagatttcacatgctatcttattattgtcagtatcgataagtcgtatcatggtgcttccacttttgtaggtagtgatgcatacgctcatttcgtcaagaatagcagtcgcaatttcttgattttctgattctaacctatagttgtactctgttaagtctgtttctataatgacatgccatgtgtctcctgcccatatagaaactgatttcttttcaacttcgtatggttcctcttcagagcaaccatacgaagatgccagtaataatacaattagcaaaagtctactgattctcatacttttaaatgttttttacaaatatatggtaatatgggagataatccctttgttttaccggataataaagtctttattgcttattccacgtagacttctacgaccgtaaagatattgtttgaacggatataaaggtcaaatgttccataaggtccgttgactatgtcaggtgctttagttagggttattcttaatttgttattggcagatgttacatttaatccttttttccctgcgctatgttctttcaagaaaaactcaatattttggggtaatgctaattcaaccgtttcacctatacggtgaagacttccaataccatacctatatgcaggcaacccattattgttagggaaaacagatatatattttacaattgcaccgatagtcatgtcactatttactattttagatacaacataggcttgataataacttgcttctacttgaatagcgtgattgcctgacgggaaatctataagtgtatttttatcaaaaatctgataaatatgtccgggcgtaaccgctacttcgtgtgtgaggttggttaatgagggtagaatatctgctccaactcctgcgccatttcctacgtcagaaataaaattagaagatgtgacgaagttattagcttcattgatataagtttttgattcacctaaataggtttttccattatgctcattaagcatattgagtgtgatggtatctgccggatcatctggcgtgtcatcatcactacaattaacgaaacacatagtacaaagggataacaagaaaatcccaactattttttttgtattcatttctttttaattttttgatttatcaggaacttagtttgacttggtgcttacaaatattttatcgatataatagtcaatactctttgaagcattgcggaataatagttgaagcttgtatttccctttaggatattcttcttgagaaggtaaaaagaatcttattttgacgctttcatgaggaggtattaaatatcctagatcattttttacataattatccggataaactaaaggaatccatgaattattactttctctatagcgcaagaaagtattactaatataggtaattgtatcgtttgtattattagtaatttctgttttcaagaatccgtcttttgagcagggggcttttaataaaaagcacacttttatatgctcattttctcttgtaataaattctttcccttgcatttgtttttcttctacaatcgtttctcctggctcgatggaattaatgaaatgtgatatatccattttatatgaattaagagagtcgatactattctcataatcaaggttcacagtatttcttgaattacttgttttattatgacaactgattaacatgaataaaacgattccattggttatcaaaatagatattaatttgagcataagttaaatatgaaatggattagataggttgcttgtccaatccattggtaaatattatttaaaattagcatttagtcgtgaggctatattatcaaccttaacaaatatagatgtaaaagttatacttcctttagatctatactctgatagattgtaagctttcattgtcatgaatgaaatactaattaataatagtgtaatacttagttttctcatatctttaattgttttttgcaaatttacggagagatgaggggggaagcaagtaaagtacgtttttgaacgtggacaaacagactttgataatcagttgtttatggctttttacgtggacattatcttatgctatagattgtttctactgaaaacatgattattaatgtatattttcgattaagtattcatataatgtagcattattatccggtaatgtgatatctagttttcttctaagtctaaggcgtctttttcttactgaatcaactgttatatttaataattttgcttcagtgttagtgtcgaacccatacatgtaaagacagcaatattgaaagtcttgttctgataaatccggacatagactatatatgtatttataaagacttggatagatctgtgttatttcatctgtgataagtttccattgtttttctgttattaatggcttatcatttcttggtttatttttatttgccaggtatgttagctccttgaatagtggtgagttctctagagatttattttgtaattccttgtaattggcacttagaagatttatttcttcctgcattttattatagttctcatttttctctttgagtgtgtttgacaatctttttttcttttccaattctaatgacacatagagcaaattttcttttatctggtttaattcatcccgttgtctttgaattttttcttttgcttttttgcgatataataggtatcctaccgttataaacagtaacgttacaatgctgataattgaaattataatgtagctttgttgtttaatctttaacctgtctacttctttgctgatttttaggtggttatatttagactctatatttagtattttggattggttgtccgcatatatgatagaatctaacatgttaacatattcttctaaattagcaagagcttctttatagtttttttctgcgttataaatttgataatatagatatttaatgctacatgtatattggggggtatcctgtggtatcttggataataactctttagctttattaatggaatttgatgccgtatataagtcaatcaatgctacataatcgggcattttttctcttcccgtcaacaatgctttgaggaggtattcttcagctttatcgtatttgttctgcatagaatagatattgcctaaggcgttatttattgatgcagtaacattaatattactagtattggctgctacagaatcggctataattagaatatttaaagcatgtgataatgaatccatttgtgcatattcacgtccaatatctcttaatgcacaagcataactatctgtattcttttcttttttgaagtattcggcagcaatctcatatcttttgatagcctctgttcgcatgaatttttctcgatatagatcgcctatatagtcataggtatatccaatgaggttattgagcttgttttttcctgcaatgtccagcgcattagtataaatagacattgctttatcataatctccatcagcaaaataggaacgacctaaataaatcaaaatttgcacttgctcgtcagggctaccatgtgaggaataccagtcataagctctttctaattggtaagttggtaggatgctattaaaaatttcgtctgtaatcttacctgataacatacaccagcgtgcaaaagctttgtcgtctagtttttcaggagatgatatactttttagtaggttggatgcgctgtcaggatttatggcaatggctttttctacttcatttagcagtctgtcagatacggattgttgtttgttgcatcctgatagcactaatatagatgttataattatagcaatactctttctcatttgtctgtcgtggtttagtttcgttgtaaaagtaatctttattttctatattatgctcttttatagggagattattttagttcggaaaataatattagtactgtctatatcatacatcatattaatttcaaatgtgcttttattttattaagttcatgtgatctaatttgattatttcccagctattaatagactctttcttatttatagtgagaaaagttcctttctattaatacctaaattactttactataattctaaacttgtttttcattaatcgtaatctataattgcaagttgtaattatataaatgaagcttttgattttataaatgaaagctttgtttataaaaacaaaagcttcatttatagattacctttaatgtaagtaatcttttccattagtgaaaaggaagtttggcattaatagagaataagtttatatctaatagattggaatcagtctattaatcaaaattcggcagaaaggtatagtgaatcgggtgaaacctatgtgaaaggtagctcttcacccgaaatccctttattcatcgatgtttcagagtggtgaaggaggtgaatgttatgtttaaagaaaagttgcagatgtgtgtaagataaaacatcttgcacgcatctgcaacggtatcttgcacaggtttatactgctattaatcaaatagataaactctggttagtgtagggtgcaagataaaatcgaaataaaacttctgtggaagtcccggaggattatcccaaaagttctttcacttttgcagaaatggcacgtccttctgcaagtcctgctaatttcttggaggcaactcccattactttacccatatctttaccgcttgtagcacctgtttcagtgataatttccttcaatgcagcttccagttcttcggcggtcatttgtttcggcaggtatttctccataacggctacctggcctaattctacgtcagccaaatcctgacgaccctgtccgatatagatttcagcagaatcttttccttgtttcacaagtttctggataatcttcagagcagcatcatctgtcaatatatcgttagctcccggggcagtcttagcttccaggaagaacttctttatatttctcaaagtttcaagggctactttgtctttcgccttcattgcggttttaatgtcttcgctgacttgatcgaataaatccatactattatagttaaaaattaaagattaaaaattagatctgaagcctgattttgcgagtttataattttcgttcttagttctttgtttagaacgtaatcacgccgttgtcatctgtagcttcttccgtggctacttcctcttccagagcggctttcgtccggattttggtaagagtagtcttatcacgcatataagtgggagaatcttctaccatggcgatgatgtcgtcgttgtccagatcttccgtattgaaaagatagatgtggcggcgtttgcggaggctcttgcttccgatattgctggcgctttcgccgtatgccttgcggatacgttctttgttcttctctttctcttcttccagttgcagttgacgttcttcctcttcttggctgcgtgcagcatgcaagctgtccattccgggaacgtcttccacaccgaatccggttgccaatacggtgatttttactcttgtttccagtgagttgtcgatggcaacaccccaaatcacttccaccccttcgcggaatttgctcatgaactcgtgtatctcgttcatttcctccatcatcagttccgacgacgggcagaaagatacgttcaacattactttcttggcattgaagatatcattgttgttgagcaacggagaatgcagggcatcgtcgattgctttcgtcacacgattttctccttcgccgaatccggtactcatgattgctactccaccatctttcaggatggttttcacatcggcaaagtcaagattgactgtaccccgcatggtaataatctcggcaatgctcttggcagcaatggaaagagtatcatcggctttgccgaaggcgttcataaaagtaaggtcggcgtatatttcgcgcaggcgttcgttgttgataaccagcaaggcatcaacatgctgggcgatacgctctacgccgtccagtgcctggataattttcttttctccttcgaagataaaggggatggtgacgataccgacagtcagaatatccatttccttcgcaatgcgggcgatgaccggtgcagctcctgttccggttcctcctcccattccggcggtgatgaataccatcttggtgccgtcgttcagctggtttctgatatcttctatactttcttcggcggcgtcgcgtgcccgttcgggacggttgccggctccaagcccttgcgtgatgctacggcccagttgcagtttcaccgggacaggtgattcggctaatgcctggttgtccgtgttacaaagaacgaacgttacatcatggatgccttcccggtacatgtggtttacagcgttaccaccaccaccacctacaccaatcactttgatgatcttcggtgaatctgtcgggaaatcgaattgtactatctcgtccatatcttgattgaattatgaattacgaattatgaatattgattaacaagctgctgaaggttacttcatatcgtcgtcggaaaagatttctttcgtcaacgaatcgatcttgcgttgaatccaactcggacctgcttctcttttccgtctttctttctcttccttttccttttgcttgcgaagtttttccgcttctttggcggctagcttggcttcccgctcttcttcttctttcttgagacgggcgatgcgggcctgttctttcagttcctgatcgtcctcaaacatatccactgtcttatgcacttccggctccggtttggagactgatggtgcaggagcagcttgcggagcagtttccgtcaggcagcagttctggttaccttcaaacaggagcccgaacaaagtgttctgcgaaccgtctttcttcagtatgttgttgggcgcatgaaccgtattgcgtgggagtttcgccatccgtatcttttctatcttgctgcgtttgcgcaaggtttcgtccagattcttcaggttggcggcccctcctgtcaagatgattcctgccagcaatttgtcctcgtagctcgatagttgtatctggttccatacgttggcaacgatttcctcggcacgggcttcgatgatattgttaagatccgccactttgatgatacggttgtcatcatccagtttgcaggttgcttcttcctgttcggggtcctcttcatagagggcgtcaccgtaggcttttttcaggcgttcggcttcttcctcctccatttgcagggtggtgatgtcacgcgtgatgctgttgcctcccaaaggcaatacagtcaggaaacggagaatgttattcttatatacagagatggtagttgtgtctgctccgaagtcgatcagtgcacaacccgaacggcgttcgctttctgtcagtacggcatttgcggttactaacggagcgatcagttggtcggcaatatcaattttagcctgttggaaacagtgctccaagttcttacgtacggaagcacgggcaacgatattgaggaaacgtccttcgatgtggcttcctaccagacctaccggattggcttgcaggttattacctaccttatattcttgtggagctacgtccaatatatccatatcgaccaccgggatggcaatgttctcatcaccgatagcgcttacaagctcttcggatatgatagcttcttcctccaggtcgcggcttactacattgcggacggtgcggagtgattgtccgccgatgcctacatataccttggcaattgagtttttcaactcaccttccagtctgttgatgattgaagtcaggctttgcgctgtcttgtccaggttaaagatcactcctttacgaatgaacgtagaagagtcttcctgggcatacgctaatacctgcatgcttccgtcactgttcttttttccggccacaccggttatcttcgatgaaccaagttcaatagcggcgataaattctgttgttgccatagggttattttatttactattttactatttacaatttactatatagagagactgtttacttatcatctatcacttatcaactactctcgttttgtacagataatctggttgctgaattcgagattgatacgtgaatatttgttccagcctacccggttgagtccttttttgtagaactccttcaaacgtgccagtttatcttcaaagttctccagttttccgagatagaccagatggtctcccacacgcggcaccaattcgatgttctggtcgggcaacacatggatctgctctatctgggcgtcccagaatttattattatgcaaaaatacaccaaacttatataaatccttcattgcaaacgacttttctacgtttccggtgacaattacccggtgagcgacgcattttgcttccggtggcatgacggttcctttgttgtcaaggtagtagttttggccgttggcgctcatgacccggaggataggaatacgctgtgtcacttccacgcacactttgccgctgggtgttttgtagcattcggcttcgtcaatcaacggatgtttgcttagttcccgttccagtgacttggtggagatgcgttccattttcttcccgatggggtagatccctttctgctgaaggatacctttcagctcttctttggtgatgaagccggcgtatgcggtatccttgataaccaattccatgtcacggcaggtctggtcggtaggcttgcggttgaatgcggtgatagctacggtgaggtaggctataagcaccagcatgacgatggatagaaggattcttttaatcataatcaaaaattaaagattaaaaattaaaaagcttgcactgtttcggacaggctgccggatgattattcatttatcttttttctaatagttcctttatttcggggacatagttgtcgatgtctccggctcccaaagtaattaatacttcaatgtttttatctttcagaatgttcagtatctcttcctttttgcacatacttttttcgatacccggacggagattatcataaatcagtttgctggtaacgcccggaattggtgcttcacgtgccgggtagatgtctaccagaatcacttcgtcgagtagcgacaggctatcggcaaaatcctgatagaagtcgcgggtgcgggtatagagatgaggctggaagatggctgtgatcttcttgtccttgtaaagttcgcgcatagacaacacgctctgtttgatttcagaggggtggtgtgcgtagtcacttagaaagacaatccggtcgttcttgagtttgaagtcgaaccggcggtctactcctcggaaacttgccatacctcttttaatttcttcatcggtcaccccgttgaggtgtgccaatgccatggcggctacgccgttctctatgttgatgcttaccggaattcccagttggatgtcgttgatacgggtgtccggagcaacaaagtcgatgaatatctccccgtttccgatacggatgttttctgcatggaagtcgccttcgtcacgtgagtaagtgtagacacgaacgtccggctgcactttgggttgcagagagatgcctttacggataatcagtgcgccacccggttggattagcgtggtgtaatgttcgaaactttccaggtaggcttgctctgttccgtagatgtccagatgatcggggtcggtagacgtgattacggtcatatagggtgacagccagtggaaagaacggtcgaattcatccgcttcaatcacagtgtaagggcttgcttgagagagtagcaggttggtgccgtagttctttgagattcctccgagaaaagcggtacattccacgtgcgactggtggaacagatgagctgtcatcgtcgatgtggttgttttcccgtgagtacctgctacgcacagacctttgctcgaatgggtaatcgttcccaatacttgggcgcgtttctgtatttcgaatccgttgttgcggaaataaacgagttcttcgtgttcctgcggaacggccggagtgtatatgactaacgtactttccttgtctttgcaggcttcgggaatcaggtcgacgttttcttcataatgtatttgtgcgccttcggagattagcgtttcagtcaatggagtaggagtacggtcatatcctgccactacctttcctttgaaaaggaagtagcgtacaagtgcgctcatgccgatgccgccggcacctacgaaatagactgattttatcgtttctatattcatttcttctgtctttttattttagtgcagattacgttgtttgatacgggcattgtgccgttacttcaatctgcgtaatccgatcgtccatttatctgttctttgcttccgccagcttaatgacctcttgtgcgatgattctcgctgaatcgggtaaagccagtttggcgatattctctgttagttctttcagtttctgctcgtcgttgacagtggacagggctacgtccatcaaagtggtttccgcttcactgtctttgacgtagatagctgcctgtttgttcaccaacgctaaggcgttcttcgtctggtgatcttctgccacgttgggcgagggcactaagataacaggtttgtgcagcaggcagaattcagaaatggaacctgctcccgcacgggagataaccagatcggctgctgcataagcggctgccatatctttgatgaaatccgttacatataaattcggaagtgctcctgccgcttttacggcttctgttacttgcgggtaatagtatttgcccgtttgccagataaactgcacgtccgtgttttccttgatggttgtcagactggctgtcagcgtgttgttgatggtgcgtgcacccaagctgccacctacaatcaggattgtctttttgccgggctgtaagtggaaagaacctagcgcttcttcttttgacggcatatcctttgtcaggttctggcggacgggattacccgtcatgatgatcttgtcggcggggaagaacttttccattccgtcataagctacacaaatcttacgagctttctgtgccaggagtttattagttactccggcatacgagttttgctcctggattaatgtggggactcccatcattccggcagtctttagtgttggcccgcttgcatatccgcctacacctaccgccacttgcgggcggaagtttttgattactttgcgcgctttccattggctgcgcatcagtttaatcaatacggatacatttttccataaatgtttgcggtcgaatccggctatcggaagtccgataatccggtagcctgcatcgggaacccgttgcatttccatacgtccttcagcgcctacaaagagaatttctgcgtcggggcgtagctctattatagcgtttgcgatagagacggcaggaaagatatgtcctcctgttcctccaccgctgatgataattctaagttctttttccatcattctgttttcttctgtcctttctcaacatttaccgttcattgtttctgctatcatgctcatcttcaaatttggcgtcgctgttcagaatctgcgctgtcggttcggctgcggcctgtgcttccgaattggctgcggcatccgcctctatttgcagttggatctgtgcatcgtgcgctttctgttcttccagatgagcggtatatcggcttacgcttaatatcattccgatataagcgcagttgattaacgtacttgtacctcctttgctgaccagaggcaggggctgtcctgtgacggggaataacccgacggcaaccatcatattcagtattgcctgtgataccaacaacagcgcaatacccatgacgagaaaggcggggaaggttcgctcgcacttttgggcgattcgtccggctcgcatcagcaaccataaatagaggaacaccacaaatattcctcctaccagtcccatttcttcaatcacaatcgcgaagataaaatcggagaatgcctggctaaggaagtcgcgttgtatcgagtttcccggacctttgcctactacatggctggtagcaatagcgattcgcgcgtgtgcaatctgtgcgtctttgtcaatatcaaatttggctgccggcacttcttctttctcaaagaaaccggaaacacgattctgccacgtttcgaaacggtgaagtcccggagtgttgtgcagtgttttggcgggaatagccatcagtatgcctacggcaacaccgcctacaagccccaatatccccaacatcccgaacagtttcttggaagatatccgtccgatgaacatcatcatacataccactccgaacagcagcattgctgtcgaaaggttttccggtgcgatgagcaggaataccagtccggtgaggatcatgatatatttaaaggcattcggattggccccatattcgtcctgccttttggacaggatgaatgagacggcaatgattaccgccatctttgccaattccgatggctggaattgcaatcccataaaagtcatccaacgggcggccccgttgacacggtcgcctgtgataatgcccatcagcgtgacaaatgccagtagaaccagagataccggatatagaaagaccggaaatacctggaaccatttgtagggaacattatgcagaaatacgactaccacagctcccaccatcaggatgatggagtgttgcgtaatcggcccccaatggtcgccacttttgtaagtcagcgtcgacgctgccgaaaacacctcgatgatcgagatgaggcagagacagaggaagataatccagattaccttgtcacctttgaatatgttctttaataaatccaatcttgcagaatttaaaaataaataattagaaattaaagggtacggacacattctttaaattggtcgccacggtcttcgtaactcttgaagaggtcgaaagaagcgcagcaaggacttaataataccgtttcacctttctttgccagtttatatgctgcttctacggcatctttcatgccggtttgcacatcggctaccggcagaccgaaacggtcgaagaattcgtgaagcttttcgttatgaagtcccagatataccagtgctgaacacttttcgcgtaccaggtcttcaatttcagtatagtcgtttcctttatctttaccaccgagaatcaataccgttttggtagtcatgctttgcagggcataccagcaggagttgacattcgtggctttagagtcgttaataaaatcaattccgcgcacacgtgccaccttttccaaccgatgttccactcccttgaaatcggagagggctttccggatgttttctttggcgatgccggcaaggtttgccgagataccggcggctaaagagttgtacaggttgtgttgtcctgtcagggccagttcctcttgctccatgttgaaggcaatcggttcggtgattttcacttcgtgatcttctacgtatgcaatcgctccatcctcttttacagcggcaaaaggatacaagtgagctttcagaccatgttttgccagttcctgtctgatgatagggtcatcgttccagaagatgaaagcatcgtccggtgtttggttttgggtgatgcggaatttagcgtcgatgtaattctgcatacaatggtcgtagcgatcaagatggtccggagtgatgttcatcaatacggcgatgttcgcacggaagttatacatattatccagctggaaagagctaagttcgataatatagtaatcgtggtaatcttcggctacctgcaaagcaaggcttttgccgatgttgcctgccaaacctacgttcagacctgcgcttttgaaaatatggtagatcagggaagtcgttgtggtcttcccgttagaacctgtaatacagatcattttggcatcagtatagcgtccggcaaactcaatctcggagatcaccggtgtgccttgagctttcagtttcaggatgatcggggcatcattcgggataccggggcttttgattacctcgtcggcattcagaatgagttcttcggtatggtgtccttcttcccaggcaatctgatggctgtcgagaagttccttatacttgtccttgatagcggacatgtccgaaacaaacgtctcaaatcctttgactttagcgagtacggctgcacctgcgccgctttcgccagctcctaaaattactattcttttcatctacaataatgtgcccttattttctaattgattgatttatctattagctgtgcacatctttaaaagttaataatcgggttaatactctctatctataaaacttgtttcccgtatggaaacttggctccggcaccttgccggttatcttattttaagcgttataatcgttattgctgccaatacaatcgttacaatccagaaccggacggtaatctttgattcatgaaacagttggtcgggtttggtgaatttcaccgtgcatcccggttcaatcaggctcatcgaagtgcggaagtgatcgtgaatcggtgtacgcttgaacaatcgctgtttcacaccttttcgttttcccgccttataataagcccgttgcaggattaccgacaggttttctaccaggaatacaccgcaaagaatcggtatcagcaactctttgtggatgatgatggcaaacactgcgataataccgccaatagtaagactgcctgtatctcccataaatacttgtgccggataggcgttgtaccataagaaacctatcagtgcaccgataaaggcgcagatatagattacgagttcttccgagcccggaatatacatgatgttcaggtagcctgcaaattcgatatgcgatgatacataggccagtacccccaacgttgcaccgataattgccgagttcccggctgccattccgtccataccgtcattcagattggcgccgtttgatacggcggtaaccacaatgattgtgacaatgacgaacaatatccatccggctgtttgcgcatgttctcccatgaacgaaaccagatcagcataatcaaggttgttgctcttgaaaaaaggaatcgttgtctgggtagatttcaggtcattcgttccgtgtatcacttccatctcccgtcccggattatgaacttcgatattctcacggatcactacgtccggacttaaatacaaggtcattccgacaattaaacctaaaccgacctgaccgataatcttgaacttgccatgcaaaccctctttgtctcttttgaagattttgatatagtcgtctgcgaatccgagcgatcccaaccatacggtagtgatcagcatcagtatcatgtatatgttatgcagtttacctaacaataaacaagggatcaggatggctacaatgatgatgacacctcccatgctcggcacgcctactttattgacgccaaacgggtcggttttagcatcacgctgcgtttctgtgatttgtttccttttgagtaggttgatgaacttatctccccagatacttgaaataagtaatgcgaggataaccgccatcaaagcacggaatgaagtatatccgaacattcccgctcctggaaaattgagcttatgtagccattcaaatagatagtataacataaataatttgccaatttattgatgtgttgttatgccggttgctgtcggatagataacgaagccggtcggcatattagcacagtctattcattatttaaaaatttctttgagtacttctttgtcatcaaaatgatgtttcactccttttatctcctggtaattctcatgtccttttccggcaacgagaattacatctcctttctctgccagcatgcaagccgtgcgaattgcttctttacggtcggcaatgcttagtgttttcttcatatcttccgcatccagtccggcaagcatgccattgatgatgtcttgcggctcttcaaagcgcggattgtcggaagtgatgatgacgcggtcactcgctttggcagcttcctttgccatgatggggcgtttgcccttgtcgcggttaccgccggcgcctaccacggtaatcacttttccttttccttcaagcactccatgaatagcgttcagtacattaatgagagcatccggggtatgtgcataatcaacaatcgccgtaattccctgcggtgagcggaccgcatcgaagcgtccggctaccggatgaagtgtgctaagagctacaagcacctcttcctctttcttgcctaacagaactgccgccccgaataccgccaataaattggaagcattgaactttccgataaactgaactgccagttcatgattgttgaagtcgagcagcatcccttcgaaatgagactctaatacccgtcctttaaagtcgctaagacttctcaatgaataagtatagaccttcgaacgtgtgttctgcgtcattaccagtccgtttttatcgtccagattggtcaggctgaatgcatttttcggcagatcgtcaaagaatttcttcttcgctttcagatagttctctactgttttatgatagtcgagatggtcgcgggtcagattggtaaagatccctcctgcaaactttagtccactgatacgtttctgtgcaatcgagtgggagctgacttccatgaaaacatatttgcatccttcatctgccatccgtcccaacaaacagttcaacgtgattggatcaggagtagtatgttctgtcggaatcgattcatcatcgatgtaattgcaaacggtagaaatcaatcccaccttatagccgaaataacggaatgtattatataataaggtagcgatcgttgtttttccgttcgtcccggtaacgccgaccagtttcaacttggaagtcgggtctccgtagaaggtagtggcaatctttcctaccgcatcttcgctgtcttttactcgtacataggtgatccccgctacaggttcttccggcatatcctcgcaaaggatggcgattgctccttttgcgatggcagcaggtatataagcatggccgtcggcttgtgtgccacgcattgccatgaatagctgtccggcttccactagacgggagtctatgttgacaccggtgatttctatgtttgaatctccggctacctctaccggttggattgctttcagtaactcatttaataacatcactctattcaatttttaatctttaatttttaattaagcgtaagcgtcactgtctgtcccttcttaacaatcgttccgttggctatcgactggctttttactttgcctacgccgaccagattgactttcaatcctttgctttccaacaagtacacagcgtctttcgctcccatacctatcacactcggtacaaaattctgcatattgctccggctctcaagaaccacagcttgtggggcagaatgggtatttccccaaacctctttgcccgaatcagcgattttgccttgtacgttaatctgcagctcttccaatactcgttgcgcttcgcgcatctctccggcttttacattcggaatgactacggaattagtatcaatcgcattggtcagcggtaaccgcaagtctttggcatacaccctttctgcaatcttgctgaacacactacctgccattaaacctcccgaagccggtaatcctggtttctggatagagacaatcatgctatatttaggtgcttctgacgggaaatacccgcagaaactaaccagataatttgttcttcccgttttgtatccggctgctccctgtgaaatctgcgccgttcctgtttttcctgaaacgtggaactgcttgcttcccgcaggtttggcaagtccttcaccaaccactttccggagaatctcacggatctgtgccaaagtcttatccgaacaaatcttgggattgattacctctgtcggatattctttcactacttccccgtccttcatggcagctttgacaaacttcggacgcacggtgactccgttgttggctatcccattatagaatgtgagaatattgatcggtggaacctgtgtctcgtagccgatactcatccacggcaatgttgtctttgcaaaataacgttctttcgggccgcgtatattcggttttccttctcccgcaatctgcaggtgtaacggctggtcgatgctcatccgtttcaacccgtctacaaatttctgcgggttgctgccgtagaaatggtctataatataagaggtacccacattggacgaaacccctagaatttccgtaacagtcagctttccatatcctccgcgatgccagttatggtctttcatgacacgtccatacatcggcatctggccgttgccggtatctaccacatagtccggcgtgatctttccgtcttcaagagctaccatgatagaggccgttttgaaagtagaccccggctcgagcatatcactaatggcattgttgcgcatttcgtagtactcaccgtctttgccttgcatcatgttgacgatggctttcacttctccggtacttacctccatcaataccaccacacccacgctcgcattcagctctttcagcttatccaccaacgccttctcgcaaatatcctgcatacctacatcgatagtactaatcagatcgcaaccatcaactggtggcacatcgacaatgttcaggtatttgttcatcaccttctgacggtgtgtcaatccgtcccgccctttcaggatggtgtcgaaagcaagttcgataccatttctcgctcctttggctgtgtctgcatacacatctcccagtgtacgggcagccagtgaaccgaacggtttcttacgctgattgtaagcttgttccttgaatccgcctttataccggttcaagcagaatacaggcagtctctttacctctttatattgtatataggagatacgtttcggataaatcagataattgcggctttttgcctggcgtcctttcttgaggtgtgccttgaattgagccgcactcttgtccgggaatatcttgtgaagtccgatacagattgaatccatattggcattgaggatggaatcccggcgtgcctgatctttctgcctgcgtttttcatccttttcaccggacataaagtccatatatattctgtactcgggcagagagctggccatcagtttaccgtcagaagaaataatgtttccacgattaggttttaccgtcacattctcttttacgaaacggtcagccacatcctgccagtattgtcgttcggcaaacatggtgatgcctgcttttacaacaatagctactcctatcaacgccatcaataggatgacgaagaagtaacgggtcattatgttctttttattaactgccacagtatttgtcttttaaacgcttaactatcatttatcaactatccactatcatctatttaataaggtaaggaggattggttgatgtttgcaaatcgctttccttactcgatatataatcttcaatgcgtgactggcggctcttttccatcagctctgagctgcgagtcagtgcatcgtatttaatgtctgtcaattcctttttcagccggtctatttcgatctgttgctgttgactggcataacgattgtgaatgtagaagatgatgaataccatgataagtaccagcaacttcgtttgacggcggaaaaaatcggtagccagaatgtctccacccagaatactcttcagagaggtgcgttttttcttcttgtcctcttctgctttcttgtttactacttcttcttccatatctttttatttcttttctgcaattcgtaatttggcgcttctcgaccgcgggtttcgttctatttctgcctcgtcgggaacgattaccttattgttgacaaggcggaaaggcgtttgcagattgccgaagaagtcggtttccgcttttccttctacattgcctgtcttcatgatgtttttcaccattcggtcttccagcgaatgataggtgataactaccagtctgccgcccggctttaatgcctccgtagcagccagcaacatctccttcaacgcctccatctcttggtttacttcaattcgtagtgcctggaacacctttgccagctctttcttttcgcgttcacgaccgaaaagcggtttgatgatttccaaaaactcaccgatggtccggatattctgtccgcttctggctttaacgatgacagaagccagtttgcggctattctttagttccccgtacaggtagaggatgtttgcaagacgttcttcatcataagtattcacgatatctgctgctgtcataccggcacgcttgttcatacgcatatccagtgccccgtcaaaacggaaggagaagccacgttcgctatcatcgaaatgatgggaagatacgccgaggtcggccaggatcgcgtctacctgttcgatgtcgtgataacgcaggaagttgtgcagatagcggaagttactgcgcacgaagatgaaatgagtatcgttgacaatgttccgttcagcgtcctcgtcctggtcgaatcctagcaaacgtccgccttctccgagccgtgaaaggatctcgcgcgaatgtcccgctcctccgaatgtaacgtctacatacgttccatccggttggatattcataccgtcaacgctttctttcagcaatacaggtacgtgatatgtcaattcatctttctccatcttgtctattatcatcgttcataatttcttctaatgctgcaccgaactcttcgggtgacatgaaaggctgttctgcccgttctttcgcccagatctctatcttgttatcgatgccgataaagcgaatatccccatggatactgcaaatctgtaaataccgtttcggaattaatatgcgcccgttgctatcaggtgtcactatttcaacgtcgctcacgaattgcctgaaaataagttggtgtttgctattccatttgttaagtctactacgtagctcgttcaactcctcgttccacacgctctcggggtatagggttaaacagtcttgaaatacgtctttacgcataataagcctctcttcggaagcggcttgtaattgcttcctgaaggtggcgggtatgaacacccttcctttggcgtccgccctggcttcaatatttcctaaaaaacgtatcattaccttattataataagcgaccgtaaaagtatgaaattccccacaattccccacaactttccataaaaaactttcagagaagttttcaacagaatgttaaatgtctatttgcttgaaaatgatgtgcctccgagaatgctttactggtggggagcccgtgggcgtagaacgaaaaaaatgtctgtataggtaaaatttaaataatgtggtgggggagattctttttcatgcaatagaggtttatctgacacccgggtgtcggacaactaatcttcgcaataaaagaaaaggcagaatataccggagtatttctgccttttaatcattatcaaaactaaaaatctgcattaaagaaatatgtgattcaaaatcactaagttttatatagttaaggtttagcggaagtctttcaactcttcctgtaatttctggcgcgtgaagaaaatacggcttttcactgtacccaacgggaggttcagtttttccgcaatttcacggtatttgaatcctgaaacgtgcatcgcaaacggaactctgtattctttggggagtttgttaactacacggtgcatctctttcaggtcgtatgctctttctgtattttcagaacttccatcctgtggcaaattcagatgataaagattatcagtctggtcgatgaatgtctggtcgcggactaccttgcggtagttgtttatgaatatattgcgcatgatggtatacatccatcctttgaaatttgtatcaggggtatatttatcttcattatctaatgcttttaatgatgtctcctgcaacaaatcgtttgcttcttcacggtcagttgtcagtttataagcgaagcgtagtaattcatcttgtactcctactaagtcttttctgaagcttaaacttttcataatgtgttgctttttaaaggtgaatattcgtttgttattttcgatgttgcaagtttacatgaatttttgaaacccggtaggggaaaaactgacgtttttttacccgaaaactatccgcggatagtttttaggtcatttttgatagtttttgggtggtgtttttttatgttctgaacttaaatcctgcattttctaccaaattattgcgattaataaaaaagaaccgttaattttgtgccatcatttttatttgaaaagaatgactgatgactctttatttttgatcgatgtcgataagatacttcggacgaaggctccgaagcattacaagtacatccctaagttcgtgatttcttatctgaagaaaattgttcatcaggatgaaattaatgtattcctgaatgagtcgaaggataaactgggagtggactttctggaggcgtgtatggattttctggatgcgaaagtggacgtgaaaggcattgaaaatttgccaaaggatggtctgtacacttttgtttccaatcatccgttgggcggacaggatggtgttgcgcttggttatgtgttaggtaagcactatgaggggaaggtgaaatacctggtgaatgatttattgatgaatctacgcgggttggctcccctttgcatacctattaataaaaccggcaagcaggcaaaggacttcccgaagatggtggaagccggattccagtccgacgatcagctgattatgtttcctgccggactgtgctcgcgccgtcagaatggagtgattcgcgacctggaatggaaaaagacatttgtagtaaagagcatacaagcaaaacgtgatgtaatacccgtgcattttgggggcaggaattctgacttcttttacaatctggcaaatgtttgcaaggcactgggcattaagtttaacattgctatgttgtatcttgcggatgaaatgtttaagaatcgccacaaaacttttactgtcacttttggcaaacctataccctggcagacttttgataaatcgaaaactcctgcgcagtgggctgaatacgtaaaggatattgtttataaactgtaactgatagaacaactataacaaggaatatggaagagattattaaaccggtaagcaaagaactgctaaaggcagaattgacggaagacagacgcttacgaatgacgaataagagtaataatcagatttatattattactcatcagaatgctcctaatgtaatgagagagattggtcgtttgcgtgaaatagctttccgtgctgctggtggaggtacaggtctgtcaatggatattgatgaatacgacacaatggaacacccctacaagcagttgatcgtatggaatccggaagcggaagaaattctgggcggttaccggtatctgcttggtacggacgtgcgttttgatgaaaaaggcgcgccaattctggctacttcccacatgtttcatttttctgatgcttttattaaagaatacctgccgcagacaattgagctggggcgttcgtttgttacgcttgaatatcagtctacccgtgccggaagcaaaggattgttcgctttggataatctgtgggatgggttgggagcgttgaccgtggttatgccgaatgtgaagtatttctttggcaaggtgaccatgtatcctagctaccatcgtcgtggccgtgatatgattcttcatttcctcaagaaacatttttatgaccaagagaagcttgttactccgattgaacctctgcaacttgagacttccgaagaagagttgaacgcattgttctgcaagaatacttttaaagaggactataagatattgaattgtgaaatccgtaagttgggctataatattcctccgttggtaaatgcgtatatgagcttaagccctacgatgcgtatgttcggaacagctgtcaattacgagttcggtgatgtggaagaaaccggtatcctgattgctgtagacgaaattcttgaagataaacgaattcgacacatccagacgtttattgaaagccatccggatgcgttgagattgtcttcttgtgaaggggaagaagtgtttactcctaaagtggttacaccgcaggcagactgttcccgttaattttacgataaagatcaagagcaaagacgtcggtcattcccgatatatagtcaagtaccgcctgtattctttcatagagtacgggcgcttttatattgtattgactggaaacccggtcgatcaggagtttggaataagtcttttcgggtgaggttacggcatctatcatcaattcgagcagggtgctgatgatgcggaatcccgccagttcaacatccagtacgtcccgtgaacggtagattttattgatagatacttcgacgctgtgtttataggctgctgccggacgctcggctatgcgcttgattagtgatccttcgaacgtgccggacagtatttcttgttcatgatctaaaaagacacgggtacactcccggatcaataaaccgatgacggaagaacgcaggtaggcgatttgctcgttgacatcattgacaatcaggaatgttttccggagatgttcttgtcgctcttcgctgaaataggtcattaatagttctttggtttcttcagtggtgagaatcttcagtttatatgcatcctcaatatccatcatctgatagcaaatatcgtctgccgcttccactaaatagactagtgggtggcgtgcatacttcaaaggatgctcgttgagcaaggtcagtcctaattcagttgctattttttggaaactttcttcttcgctgacgaagaatccaaacttcgatttggttcttgcaaggctcgatgaaaagggatattttacgatagaagccagagtggtgtatgtcaggacgaatccgcctttgcgacgtccttcaaactgatgtgtcagtattcggaacgcatttgcatttccttcaaaatgtgtcaaatcttcccattccatcggagacagttgctcgccgttcggctgcttttctttcagacgaactccttttccttcagagaaaaaggtagaaatagccttttcacctgaatgaccgaagggcggattacccaaatcgtgtgccaggcaagcggccgagacgatagaaccaatctccggcagaaaagaatcttgaagttccggatgacgttccagaagtgctttggcaacatcgtccccgagtgaacggccaacgctggctacttcgagactgtgcgtaagtcggttgtgtacaaaaacgctgcccggaagagggaatacttgcgtcttgttctgtaatctgcggaaaggagccgaaaaaatgagacggtcatagtcccgctggaattcggatcggttttcctgtcgttcttcatggaattcttccatcccgaaacgtttcgctgatattagttgtttccaattcatcatttttatttacgatttaacgatttgcgatttgatgattgatgaatgtgtcaattgacagttggtacattagcacctcgccttattagcacattatttattatttaactgcaaacttaactatttttcagttcaaaatgtgtattttcgcttgttaaatctgctgtccgagatatttgtcgttaaagataaaataggttcggggttttgactgaatcggcggtagacttgatctggattaatctttttacttcttatttatatgaaaaaacaggttacagcctttatctgtataatcgttttcaattttgaagccatattcgcttctactgatttctcttttaaaaggtatcaggtggaagacggactttcgcacaatacgacttggtgttcgattcaagatagctatggctttttgtggattggcacaagtgatggaatgaattgttatgatggttgtggcaacagggtgtatcggaatgctttgaataataaatattctttgggtaataatttcgtcagttcccttttggaagaaggggaaaatatctgggtaggaacaaattcgggactttatatctatgaccgttctactgaccgcttttcttattttaatgaaacaacacggtatggcgtatttgtcagtagtgaggtgaagaaaatcataaaaactcaaagcggtttgatttggattgctacgttggggcaaggtgtgtttatttatgaaccagtgacaggtgtgctgacacagaatagtattcatacttcttttgtttgggatatctgtcagagtgcagattcccgtatttatgtttcttcaatgcaggaaggactattttgttttgatgagaagggaacctttctgcaaaattatccggttctgtcagattcaaacataggcagtcagagaatcaattgtctctatagtattaagaatgaaatatggtttggcgtaggtactaatttattaggttgttatcaggaaggaagcccggatttgaaaatttatgatgcgtctgcacagaatttcggtgctattctctgtttgctggattataacgaaaaagaattgttagttggtacggataatggactgtatctgttcaatcgcgaccttaaaacatttcgtagaggcgattctccctttggcttgcgggcattgggcgatccaactgttaatgcaatgatgtgggatgccgaaggtacactttgggtgatgactaactccggcggagtgagttacatgactaagcaattgaagcgttttgattactattcccttatctcattatcaggtacattagagcttggcagggagatcggccctctttgtgaagaccagaatggaaatatctgggtgggaacccggaacgggttatgttttttcaatacacaaattcattcactttcggagtatactttaaagaatgtggatgcgagatataacattcgtagcttgctgctagatggcgaccgcctttggataggaacctatgcggaagggttgcatgtgctaaacctgaaaactggagcagtaaagagttatgtccattctcgcgatattccctatacaatttgtagtaatgatgtcttgagtctctttaaagaccgaaaaggagatgtttttgtaggaacaagttggggcttatgtcgttacaattcgcaattggataattttgtgacaatcattcatgtcggctctatggcttctgtaactgatatttatgaggatatgtacaataatctttgggttgcgacctcaaatagtggtgtctttcgttataatacagtgaacgatcgttgggaacattttgaacatatacgtgaagatacaacaactattaccagtaattctgtgattacattgtttgaagatatgaaaggaacaatgtggtttggaaccaatggaggaggattatgctcattctccaaagatacggagactttcattgacttcgacccggaaaatacattgttgcctaataaggtaattttctctatagaacaggatcggaccggtgatttttggatttcctgtaatgccggattatgccgcattaatcccgtgtctcaaaagaactttcatttatttaccgtaaatgatggtttgcaaggtaatcagtttactgcacagtcttcattgagatcgtccacagggaagttctattttggaggaatcaatggtttcaatgtatttgaaccggggcagtttacggataatacctatcttccccctgtttatgttactgatattagtttcccttatttggcagatgaacaagaagtgaaacggctgcttcgtttagataagcccttctataaagcggataagatccaattaccctatacaaataatagttttacagtacgttttgtagcacttagttatgaagatccacacagaaatcgttatacttatatgttgaaaggtattgataaggagtggatacattcatctaataatacggcctcatacactaatcttccagctggggaatatgagtttttagtttgtggctctaacaatgaccatcactggaatgagaaagcggcttccttatggattgtgataactccgccctggtggcggactagtgtcgcttattttatgtatatactattatttctgtgtacagcttgctatattggttggcgttggaatctctatgtcaagcgtaaatataaacgtcgtatggaggattatcaggttgccaaggaaaaagagatgtataaatcgaaaatcaatttttttatcaatctggtacatgaaatacgtactcctcttagtctgattcggctccctctggaaaagttgagggaagaggaaaaagaagaaagaaaagaaaaatacctttcggtgatggataagaatgtaaattatctgttgggaataacgaatcagttacttgattttcagaagatggagagtggagcattgcaacttagcatgaaggagtgtagtattaatgcgttggtgagtgatatattcaatctgttcaatggttctgtagatttgcaagggttaacaatctgtcttagtttacctcctgaagaaattagtgtgatgattgattcggagaaagttagtaaaattttggtaaacttggtaggaaatgctattaaatatgcaaaatctcaagtcgagatgcggctaatattattgggcgatagggtaaatataatagtgagtgatgatggccccggagtccctgaaggtcagcaaaataagatatttcaggctttctatcaattgccggatgatccggtggcaacgtctacaggtacagggattggtttggtatttgccaaatctttggcagaagctcatcatggaactttatcattagaaaataggatggaaggtggttcctcatttatattgtctttgccgttggaaacagtagtaatggaaagtattccgaatgaatttgctgaaatgcagatgatagatgtggaaggaaaaaaaatgccggattcggagtttggaaataagagattcattgttttattggtggaagataatgtcgagttattaaatttgaccagagaatctctaagtgattggtttaaagttttttctgcctgcaatggaaaagaagcactggaaatactttcacgtgagagtattgatgtcattgtaagtgatattatgatgcccgaaatgaatggtcttgaactatgcaactatataaaatcagatctagtttactctcatattcccgttatcttgttgacagcgaagacaacgttagactcaaaagcggaaggttttgaaaatggtgctgatgcatatattgagaaaccattctctattaagcagctccataaacaaatcgaaaacttattaaaactgcgactggccttccataagttgatgattaatctttctggaagtccgacttcttcattggcggattttgctctttcacaaaaagatgtagaatttatagagagggtaaatacgattttgtcggaactgcttgctgatgagagttgctcgatagatttgttagcagagcagatgaatatgagtcgttctaatttttcccggaagataaaggctctgtctggtatgccgcctcatgattatataaagaactttcggttgaataagtcgactgaactaatcatgagtggtatacgaatagctgaagttgccgaacagttagggtttactacttcttcgtattttgcaaagtgttttaaagaaaagtttggggtattaccgaaagattataaaggataacagctagttcctatcactcgtgggggtgccagacggcttttgaagcagggtgctttccttttgggggattcctaaaatgggaattccattttcatcccattctatcttttgtatgcgtgttgtccgaccgtccaaaacgaacatgtcacgaagggcatttcgagcgtggtaaagtatataccattctttcttgtcgggtgaaggtatgaaacacaggctaccggggccatacacatgattctctggtgcttgtttgaatacaggttccagagatttcttccatgaattcgggttgagaagatcgctgttagcatcagctgttaataaccctacacaataataaggtgtccagttaccgcttgcagagtaatatattaataatttgtctttgtttttggaacggaaaaattgtggagcttcattcacatgaataggataaccggttttattgccatctacactgatccattgacattcccattcgtattcaggtttggatattaatatacggtctgaggctagtgtccatggatttttcatttcagcgatatagatacattgggtttcttgataaattcttctggtttcccatccgcaccagattagataacgtttgccattatgctcgaaaggattagcatgaatagccaagttattatttttatcggtcgatattcttcctttcatgacaaactctcctttcatgggatcgggagattcattttctagcacatatatctgacgattgtctatattaccatcatcagcagcgcaatagatataccatttattgtccatatagtgtatctctggtccccaaagatgagatatacccgaggcattttggggcgaatatacgtttttttttgctgcttctgccagttgtgtaatatcgtcagtttcccataatatgatacagtctgctaaactttgagtatagtaatattttccttcatgaaagatggcccatggctcggatcctccacctatgacaggatttgtgtagaaaagtgtagagtcaatgcctgtttgtttatcagtctttttgctttggcatgatagacaaacgataagcaatattaaaaataagcaattttgaaatttcatagtgctttctttgctaagatacttgcaaagaaagcacaaattatttaattctggagctgtttgattagtttttattgtttgttagttaggaattagcctataattaataccctcctttctatatttgcaattaataaacctttggatccattggctattaaatcttatattaactaaatttattattatgatgaacaggaaaggaaaaagaatgaatgttgttaaggcattttgtttatttactttgcttgggtgcttcattggctgtaaagacgatgaaaagaagaaagagcaatcttttaataacgatttgcctattgaaattgtgggttttgaacctcaagaagttacttcgcgcacgcaactccttatctatggaaaaaatttcggagatgacccctctttgattcacttgaaattaggaggtgtggatacaaaagtggtgggttgtaacaatgaatgtctatattgtatggttcctcgtaattcgaataagggaactatcgagatttctattggtgatcagaccgctatggctaacgatcgatttacttatatctcgaatacacaggttactacattgtgtggctatgtagacgagactggacgttatgaagtaaaagacggttcgttcgacgaatgtggcttgaattgcccggcttggttaagtattgatcctcaaaatccgaaccatatttatatgattgaagaggcgaatagtatccgtttgatagatgtggaagcgaaaaaaatgtctactgttataacggtggggcagatgaatataacgagtccgcgtactttgagttggagtctgaccggtgatactctatttgtgaataactgggcagattgggaagcagctccgatttctattgttatgcttttgagaaaagaagaatttaagaagccacatgtacttctttctggtcgtaatcatattattgcggcaattacccatccaaaaactggtgatatatactttactcaagaatctggtggtggcgtttatcagtatagtatatcaacgggagaggtggaacaaatgtttacgataggaggatcttggatatgggtatatccttattttcatccgtcgggcgactttgcctatatccttcggccgcgtgaaggtactattttaaaatctaagtttgataaagaaaccaatcagttggaagctccctctgtttttgcgggaaactggaattgggggcatagagaaggggtaggaaccaatgctaatatgggagttttgtggcaaggagcttttgtgaaaaatgaggaatatgcgaatcaacataaggaggacatatatgacttttatgtagctgacggagagttatggggcacacatccgggtgatttgatatggcgggtcactcctacagctgaagttatccgctatgccggtcgtggaagcacggccatggatggtaaccattggggctatgtggacggtgatttgcttaaggaagttcggttcaatggtccgcacagtattgcattcgatgaagaaaataaaatcttttatataggtgatcagtataaccaccgtattcgtcagattattgttgaataataaaatatcctgtaaattatgaaacaaaaactatgggctatcatagcttttctatattgttttatgttaggaataactgcccagcagaataaccaaaaacaaattgtggtgtccggtgtagtgaccgatgccaataatgaaccgttgattggtgctaatgtgacggtgaagaatgtgccgggattaggtgctatcactaatattgatggaaaatataccattaagatgcaaccctacaaccgcttggtgttctcctacatcggttatgagactcaagagattttagtgaaagaggaacatactgtcaatgtggtgatgaaagagaataaggagacagccttggatgaggtagtcatcactgctaccggtgcgcagaagaagttgacagtgacgggtgcagttactaccgtcaatgtagaccggttgaaggcgtcaccttcgggtagcatttccaactcactggcaggaaacgtagcgggtgtgatagcccgtcagactactggccagccgggaaagaatgtttctgaattttggattcgcggtatctctacctttggggccggggcaggtgcattagttttggtggacggatttgaacgtgacatgaatgaactgaactacgaagatattgaatcgttcaccgtgttgaaagatgcttccgaaactgccatttacggttcgcgcggtgctaacggtgtggtattgattaccactcgccgtggtaaggtagacaagattaccattgatgccaaggtagagaccatgtacaacacccgtacttttacgcctgactttgtggatggcattacctacgcctatatggcgaacgaggcacgccgtacgcgcaatctcgatcctatctacaccggcaacgagctgaaaatcttgaaacagggtctcgaccccgacttgctacccaatgtagactggatggacgaattgctgaagaaaggtgctatgagttatcgtgcctcgttgaatttgagtggtggtggagagaatgcacgctatttcgtttctgccagttatctcgatgaaggcggtatgtataaggtggacaagtctttgaaagactataacaccaacagtaacgccaaacgttggaactatcgtatgaatgcggatatcaatattaccaagactacccttttgcaggtgggtatcggtggtgcgttgaagaagatgaacgaatcgggcttgacttcggatcaaatttggaccagtctgttgtttcagactcccactagtatgcccaaaatgtattccaacggttacgtgccaactaatgcggatggtaaccttaatccttgggtggcatctactcaatgtggatacaacgaacagtggtggaacaatattcagaccaacgtcactttgaatcaaaaattggacttcatcaccaaaggattgaattttgtgggacgtttcggctttgatacagataactacaattatatccgccgtttcaaatgtcctgagttatggagtgctgaccgttatagaaaggatgacggttccatcaacttcacccgccaaaagaaagagcaggtgatggatcagacttcaggcaatagtggagagcgcaaagaatattttgaagcggaacttcagtatgcccgcaatttcaagggacatatgctgaacggaacattgaaatactcgcaagactccaaagtgagaacacaggaaatcggtaaagaaatcgtcaattcgcttcctttccgtcatcaagggttggccggtcgtattgcctacaactggaactatcgttatttcttgaactttaactttggctatactggttcagaaaactttgcttctggtcatcagtttggtttctttcccgcctattcgactgcctggaacatcgccgaagaaccctttgtcaagaagaacctgaagtggatgaatatgtttaaagtgcgctattcgtggggtaaagtaggcaacgataaaatgtatgagcccaatggtgtacagatacgtttcccttatctctacacaataggttatggcggtgcccctgctaatatttggggagataataacggatattattctgcgtttggaggatataactgggcggattatggctatggaagtcttggtactactctttttcaaggtttgcgctatacatcgtatgctaacccgggtgtgacttgggagatcgccaccaaacatgatgtaggtttggacatgagcatctttgatgacaaattcatgctgactgtggattatttccaggaaaagcgtaaaggcatctttatgtatcgtaatttcttgcctgctaccgccggtattgagggcgggatgaccaatccgagagctaatgtgggcgcagtattctctaaaggtgtcgacggtaacatgacctgcaagcaacagattggcaaagtgcttttgactgcacgtgctaatgccacgctctcaaagaacgaagtgaaggaaaaagatgaacaagagaacatttatccttataggatggagcgtggctaccgtgtcaaccaggctaagggacttattgcattgggcttgttcaaggattacgatgacatccgtaatagccccaaacagacttttggcaattatatgccgggcgacatcaagtataaggatgtcaatggcgatggtatcatcgacgaccaagatcaagtggctgtgggggctactaccgtacccaacttggtatatggtataggtgtctccgcacagtggaaaggtttggatgtgaatgtccatttccaaggagccgggaagtcttctttctttattgatggagagggggtgcgtccttttgctagtggcaaccggggtaatttctatcaggaagtaatagacggacgttggatttcaaaagaagaatcgggcacaatagctacggaaaatccgcatgccaaatatcctcgcttgagctatggctacaacgacaacaacaaccgcaactcatcttactggttgcgcaatgggtcttatctgcgtttgaaaacgctggaagtgggctacacactgcccaaaaagatcgtaaatagaatccacttcaacaacattcgtatctacatgattggcaccaacctgattacgtggtcgaagttcaagatgtgggatccggaaatgaacagcagtaatggtgcaacctatccgttggccaagtctgtcactgtgggattaaatgttaacttataacaaaatgaaagatatgaaatggttatataatatggttatcacgttttttgctgctggctgtttgacggcatgtagtgattatttggaggtagattccaatttcaaagaccgcttgacaattgaaaaagtatttactgataaggattatacggatgcgtggctttccaatacttattcttatctgcgaggccaaaatcaagatgtgggtggaaaagagagcgtgcctacgaattttgccgatgacatttattgggcggattggaataatgagggaaatggtaaatataccaatggtagttattattcttttttcagaaatgtggaatacaatgaaaattggtatcaggattcttataaagcgagttatttaggaatcaacaaggcctgtgttttcttgaataatatccacatgaaccaacaactcacagacgaagaacgggctgattatgcggcacaggcacgttttgtccgcgcttattactattggttgctgttacgcaaatacggtccaatccctttgattcctgatgaaggtgaagactatatgcaggactatgatggcttggctcgtccgcgcaacacctacgatgagtgtgtggaatacatcacttccgaattggtgaaagcggcacaagatcttccgttggaacgtggaaccaacaacatcgcacgtcccacccggggcgctgctttggctgctcgtgctaaagtcctcttgtatgccgccagtccgctaatgaatggcaatactgactcttatgcgcagcaaatggtagacgacaaaggtaacagacttcttgctgctgaatacgatgaatcgaaatgggctaaagctgccgctgccgcccgagacgtaatggaattaccgggaaataatgatggtcatcgctaccaattgtatgtaaagagccgcattacaagcggaaccgaagattatccggaaacaatagaaccgtttaaggatagaaatttctcggaaaacaactggccatacggatatgcggacattgatccgtttgagtcatatcgttccgtcttcaatggcgaactctctgcttatgaaaatccggagttgattttttcgcgtgtggataatataactgttgataattcatcaggaggaatcacttcaccggatgctattgcaaatatggtgcttcaccaattgcctacactggccggaggttggggtgttcacggaatgactcaaaagcagtgtgacgcgtattatatgaatgatggtacggattgtccgggtaaggataaagagattggaagaggagatggaagcagccggctaaccggttacgtgacttctgatgatgtggatgccggtcgttacaaaccgctgcgtgcaggtgtgtctttgcaatatgctaaccgtgagcctcgtttctatgcgtcagttggttttaatggcagtgtatggaatatgacttcattaggtaacaagcaaggagctacccagcctaatcagcaagtttggtactatcgagggacttcagaaggatataatggtggtaatcgtatatttacaggtatcggcatcaagaaatatgtgaatccttatgatgccaaatatcagaatgagcttttgtacagacaaaaagcagaaccggctattcgttatgcagaaattttattgatttatgccgaagcgttgaatgaattgggagagggagcaagctacgacatcccttcttgggatggaagtatcacctatacagttagacgtgatgtggaagagatgaagaaaggtattcagcctgttcgtattcgggccggtgttcctgattattcacctacagaatatcagaatcaggatgttttccgaaagaagctgaaacgcgaacgtcagattgagttgatgggcgagaatcatcgttattatgatttgagacgctggaagatagacgctcctttagaggaagaaacgttgatttacggatgtaatatgctgatggatgacggtcataaagctctattccatacacctgtggctattatgtcattgcctgttcgctttgtggagaaaagctatttctggccatttagtcatgaacagttgcaacgtaacaagcgtctgacgcaaaacccgggatggacttattatgattaatctttatatgacaatgaatatgaaagaaaaaatatattatctgttatttgccgtgttgatggctttgttttgcacggcttgtaatgaagaatggaccgatgaacaatatgagcattatgtttcgtttaaggcaccgatggattatgcgagaggtgtaactgatatttatgtgaaatacaagctgaatggtgcggtgacttatcaactgccggttattatgagtggctctacattgcccgggcacgatacagaagtgcagatagcgatagactcggacacgttgaaaagtatcaattgggagtattttcacaatcggacagatctatattataaggagcttacctccgattattatgaggtggagaacatgaatgtggtaattccggcagatgattgtgtgggattgttgaatgtcaattttaaattaggtgggatagacttggtagataagtgggtattgccgcttacgattagagaaagtcctatcggcagttatactcctcatcctagaaagaactacaagaaagcattgttgcgtgttgttccttttaatgattattccggtatttattcaacaaccacaatggaagtcggttttactgattcggggactaaaatgactactaatacgcgtacggcatttgtagtggacgaacattctgttttcttctatgcaggcttgatgaatgaagaagaactggaacgtggaaagtataagataatcttcaggtttaacgatgacgggacggttacgctttctgcacctgatccggacattcatttcaatccgataaaaaatccaacttggaaattggcggaaaaaatggacgtttcgttgccatatctaaaacataaaacgattactatagaaggatttaaatatgaatttgatgatgtcacatctgttcctggtactcctataagatatgtagttgaagggactgtgaatatggaacgtaaaattaatattcagattccggatgaagatcaagcaatcgaatggtaataatttgtaagtcggagtgatatgtataaatggattatattaatgtcgggattatttgcgtcactgaccgcttgtgccaaagttaagttgtctcctttattttccgataatatggtacttcagcaagaggctgaagtacctgtttggggaaaagcatctccagaaatgcgagttatagtgattccttcatggagtggggagaaatatgagaatatagctgacaggacgggtaattggaaagtaaacatcaaaaccccaaaagccgggggaccttatcatttagaaataacggatggagaaaaagtaagattggagaatgtaatgattggtgaagtatggctttgttccggtcagtcgaatatgcaaatgccagtagaaggatggggcaaagtgaaaaactatcaacaagaggtggcacaggccaattacccggatatacgcttgatgactgtgagtaatactattagtctaagtccgtcgcaggagtttactgctgtcggaggaggatggcaagtgtgttcatcggttactatccgggagttttcagcaacagcctattttttcggtagggaaatagcacgcacgcagcaggtaccggtaggacttatctgtgctcattggggcggtactaatatagagccgtggataagtgctcaagcattgggcgaagttcccgattttgttgagcaattgaagcttatccgaaggttgggaaacaaggattgtgatttacaggcggaggaagaacaaaggcaggcaaagattttgtcgttagataaaggaatgagaaatggaaagcctttttggaatactctttcttataatgatgaaggatggatatctcattctttccccggaaatatcgaaaagacttttcctgattttgatggtattgtttgggggcgaaagacggtggatattccagaacaatgggagggaaaaacgttgagtttacacatggggtatgtggatgacgaggatattacttattttaacggaatcgagatagggagcacgaaaggatatactcgttcccgtacttatgaaataccgggtaatttagtaaaagcgggcaaagctgtaattactgttcgtatcgtggatactggaggagggtgtggcatcggaggtgaaatgaagttaagcaaagatgtcggagactggattcttatatctggtgaatggaagtgtaaagttgccgctcaatctcatattgacccagtgtttgagatgaatccgaatgtgcaaactgtgctttataatgggatgattcatccattggcaccttacaaatttcgtggggttatttggtatcagggagagaataatgtagggcgtgctacacaatataggatattgcttccattacttattcagagctggcgtgaggaatgggggaatgattttcctttctaccttgtgcaattggctaattatttagagagagcagatgaaccgggagactcacagtgggctgaattacgagaagcgcagcgccagacagctttgtattatgacaatgtgggtatggccgttaccatagacatcggcgatatgaatgatattcatcccaaaaacaaacaggaagtagggcgtagacttgccttattagcacgtgccgatacctatggtgagcggattgtttgtagtggtccggtttatcagacttaccgtgtgaaaggagacagggttattctctcttttgagtgtgcagacggaggattaaaaacgtctgatggaaaaaaaatgacagggtttgccatagcagggatagacggaaaatatcattgggcggaagctgaaatctgtggaaatgaaatcattgtatcatcggaaatggtaaaacatcctttgactgttcgctatggatggggagataatcctacatgtaacttaattaacggtgcaggattaccggcctcttcatttcaaactttacgttaaacttaaaaaaacaagaaaaatgaagaaacttaactttttatttttaggcttattatcttttatgccaatctggggatgtaacgatgatgattcattaccggaggctgttgttgaagtcaaggaagggcataatgaagatattgtatcagtcattgattatgatattaagaatgatggaacactgattggttctcaacttaataatttggtcggtcagtcttatgggaaaacgctttattttcctgccggaacttataacttgacggagcctatcgttctgccattggaatataccaaaaatgtaaaccttatttttgataagaatgcaacggttaaaagtgatgtccatttggaagcattgattaaagtaggttattcagaaacctattttaccgatgtttcacatcggcgattctcttatatcgaaggaggaatactagactgttataatgcagataatggaattctagtaaacggaaggaagcagttggtgcagatacgtacgatgagtctggtgcgaggacgtaatacacatatccgcatacacgttcctgaaggtattggaactggtggaacgggtagctcggatacaaagatagataatgtaacaattcaaggcatctcttcgaatgataatgtatacggtatctatatagatgaatcttgttgtgattgtaagatatctgacacttttatttattgtacaaaggaagctttagttacgaaatctgccggtcatatattgaacaatgtacatattctttcttgggatactaccggagggacccatcttgaggatggtaagaattaccgttcaacagtcggaatacgtatagctagtggcggattttttgttttcaatcaagtctattatgatacgattgatagaggaatcgtcgtgaatgagggttatagtccggatttgatgctggaccaacagatttctttttcatatttgaataattttggaaccagctttattcaggcagaagggaataaccccaatttgaaagtgaagttgtccaattctacttttactgtattaaatgataattttaagattctagattgtcctgttgatttggtgggatgggatattgcggataagttttctttcctgaattgtgtagttgctaattcacagcgtttgtatccttacgaaacgactttgatgcagaagcttagaggggtaagttctgacgggataatatggacaactttagctaattatgatatgaattggaatgtattaggggctgtcatttcttctccaatgcggaatacccttgagatagatttagccgataatttgactgtaaaacttaattttatgtttaaaggtgttgaacctctcttgcaaggttatgaagtgctgggagagggagtagaggatattgaatttggatatgctgtttccggtcagttctgtgtgttgctgttcagggcaaaaaggaatgcttctttcaatccgatcatttacgatacattaggttccgggcggtttatgccgactccgtataaaggcaaaaaatatacacttgttgattatgggttaagtgattcggatattaagattttatctcattaatgtaagtatctaaataatgaagtgattatataataagtaataaacatgaaatatcaatacttgttattaggcgttctatatgggttgttattgtcttcctgttcattgtcggctgaagaaggagataaagagatggatcgatatattgccaatctgatgggaaagatgacactgcacgagaagttgggccaattgaatcttccttccgggggtgatttggttactggtaatgtaaatagtgccgaacttacgaaaatggttcgtaaccaggagattggaggtttttttaatgtgaaaggaataagaaaaattgttgatttgcagcgtatagccattgattctacccgtttgggaattcctttgctggtaggagctgatgttatccacggttatgaaaccattttcccgattcctttagcgctttcttgtagctgggacacactagctgttgaacgtatggcacgcatttctgctgtagaagccagtgcggatggtatttgctggacattcagcccgatggttgacatttgtcgtgacagtcgttgggggcgtattgcagaaggtagtggtgaagacccttatttgggttccctgttagcaaaagcctatgtacgcggttatcagggaaataatatgcagggaaaaaacgaaattctttcctgtgtaaaacactttgcattatatggcgcatccgaatcagggaaggactataatgtggttgatatgagtcgccaacgtatgtataatgaatatcttgccccatacaaggcagctgttgaggcaggtgtgggtagtgtgatgagttctttcaatttggtggacggcattccggctacggctaataaatggttactgaccgatttgctccggaatgaatggggcttttgtgggttgttagtgacggattataattctatcgccgaaatgtcctcacatggggttgctcctttgaaagaggcttctgtacgtgctttacaggcgggtacggatatggatatggtttcttgcggttttctgaatacattggaagaatctctgaaagaagggaaagttacggaagaacagattaatgccgcttgtcgccgtgtattggaagcaaaatataaattgggcttgttctctgacccgtataaatactgtgataccctgcgtgtggaaaaagaactttatacgactgctcatcgcgcggtggcgcgtgaaatcgcagctgaaacatttgttctgttgaagaatgaggatcatctgcttccgctcgaacggaaaggtaagattgctttaattggtcctatggctgatgcccgtaataatatgtgtgggatgtggagtatgacgtgtactccttcctgtcacgggacattattggagggaattcgttcggcagcaggtgataaggctgaaatactgtatgcgagaggtagtaatatatatcatgatgcggaacttgaaaaaggaggagctggtatccgtccgttagaacgcggcaatgaactgcaattgttggatgaagctttgcatacggctgcccgtgcagatgtgattgttgcggctttgggagaatgtgctgaaatgagtggtgaatcggcttcacgtacggaactagggattcctgatgctcaacaggatttgttgaaggcgctggtaaagacgggtaaacccgtagtgttgcttctttttacagggcgtccgttagttctgaactgggaggatgccaatgttcattctatcttgaatgtctggttcggtggaagtgaaacaggcgatgctattgctgatgtattgttcggtaaagtgactccgggcggcaagctgactacgacttttccccgttcagtgggacagcttcctctgtactataatcatttgaatacaggtcgtcccgatcctgacagtcattcttttaaccgttactccagtaactatctggatatgagtaacgaacctctttatccttttgggtacggtttgagttatacaaatttctcttatgggaatttacaacttagttcggatgtactgtccagaaatggggagttgacagtgtctgtgactgtaaccaatgacggagattttgacggatatgagatcgtacaaatgtatctgcatgatatttacgctgaaatatctcgtccagtgaaagagctgaaaggctttgaacgtatcttcttgaaaaaaggagagagtcgtgaagttaagtttgttatcacggaagacgatttgagattttataattcaggattacaatacgtttatgaaccgggagaatttgatgtcatggtaggagcaaactctcgtgatgtgcagactgaacgttttagggcagattgatcgtatataaactttctttttctaagatgtaaatattcttttgattataactaaattatggttgccgctttggactacaaaacagaaactttcggttgtagctaaaggcggcaacgttgtgattggaagttccgtttatcatttgaacttaaagatgcttgacttatctttttatttaggatttagttgtttaccattcgcaatttggttgcaggtacattatttaactgcaaacttaactatttttcagttcaaaatgtgtattttcgcccgttaaatagtaaacatgcatttatgaatattcaagttatcaataaatcgaagcatccgcttccggcttatgccaccgaattgtccgcaggaatggatatccgtgctaatctttctgaacctatcacattggaaccgttgcaacgttgtctggtgccgacaggattgtatatcgctctgccgaagggatttgaggcgcaagttcgtccacgtagcgggctggcgataaagaaaggtatcacggtacttaattctccgggtacgattgatgcggattatcgtggagaagtttgtgtcattttggttaatctctcgtccgaggcttttgttattgaagatggcgaacgtatcgcgcagatggtgatagcaaagcacgaacagcctgtatggcaggaagtggaggtgctggatgaaacagaacggggagccggtggtttcggacataccggagtatgatgaatgcttaatggagaaaatagaatgaagataaaaataggatggctgttcgtgacggtattgatgctcacttcatgtgggggaatccggtctgtgcgtacagcaaaaacaacagcgaaagcagatggagcttctttgatgaaggaaacattgctttctgctgaacaacagcgtaaatatgactacttctttttagaagccatgcggatgaaaggaaagaatgagtatgatgcggcatttggattgctacagcattgtctggatatcaaccccactgcttcttctgcgctttatgaaatatcgcaatattatatgttccttcgccaggtgccgcaaggtcaggttgctttggagcaggcagtggcttttgcgcctgataactattggtatagtcagggattggtcagtttgtaccagcaacaaaatgaattggataaggctgcggctttgcttgagaagatggtgacccgtttcccgtcgaaacaggaccctttgttcagccttcttgatatttacagtcgccaggagaagtataatgatgtcatttctacattgaatcgtttagagaaacgtttgggtaagaatgagcagctgtctatggagaaattccggatttatcttcagatgaaagatgataagaaggcatttcaggaaatagaaagtctggtacaggaatatccgatggatatgcgttatcaggtgatactgggagatgtatatcttcagaacgggaaaaagcaggaagcttatgatgcataccagaaggtactggctgtagagcctgataatccgatggctctcttctcgatggcttcttactatgaacagaccgggcagaaagaattgtatcaacagcaactggatacgttgttattgaacaaaaaggtgacttctgatactaaaatcagtgtcatgagacaggtgattgcggaaaatgaacagtcgtccgctaaagatagcactcaggtgattgccttatttgaccggatgatgaagcaggatatggatgatccgcagataccgatgctttattctcaatacctgttgtcgaagaatatggaacaggaggctgtgccggtattggagcaggtggttgatctggatcctaccaataaggctgcccgtctgatgctggttagcgcggcggtgaaaaaggaagattacaagcaaattatcaaggtctgcgaaccgggcattgaagctactccggatgcgttggaactttattattatctggctatcgcttatcatcaggcagaacagggagatagtgtattgagtgtttgtaatagagcattggaacatataactcccgataccagaaaagaagtcatttcagatttttattctatcatgggggatatttatcataccaagaaacaaatgacggaggcttatgctgcttacgattcggctttggtatataatccttccaatattggcgcattaaataattatgcttattatctgtctgtggaacgtcgtgacttggacaaggcggaggagatgagttacaaaacggtgaaagccgaacctaataattcgacctatctcgatacttatgcatggattctttttgaaaagggaaactatgccgaagcccgtatctatattgataatgcaatgaagaacgacggcgagaagagtgatgtgattgtggagcattgcggagatatttattttatgaccggcgatgtggaaggtgcgttgaaatattggaagaaggcactggaaatgggtagcgagtcgaaaacgttgaaacagaaaatagagaagaagaaatatattgcggaatgaaaagaatcatttatctactgttgttggtggtagtggtgttggccggctgtaagagttcgaaacacttggcaacttcggaaactaagacttcgacaaaggctccgacatccagttacctggcttccaagcttcagttgactattcccggcaagaagggaagcatgtctgtagggggaaccatgaagatgaaaactcatgagcgggtacaaatctccttattgatgcctattctgcgtacagaagtggcacgtatagaagttactcccgacgaagttttattggtagacaggatgaataaacgctttgttcgtgccactaaagctgaattgaaaaatgtattgtcgaagaatgtggagttttcccgtttggaaaagatattgatggatgcctctcttcctggtggaaagacagagctgacaggaaaagatataggaattccttcattagaaaaggcaaaagtccaactttatgagttctccacacaagagttttcgataactccgacggaactgacgtccaaatacaaccagattcccttggaagaattagtaaaaatgctggtagctttattatgatgaaacgtttctttgttattctaatcagttgcctttggttggcagttcctcttttcgctcaatcgaacaagttgattcgtgagctggaaagtaaacgcggtgcgctgcaaaaacagattgccgaatcggaatctatattgaaggatacaaagaaagatgtgggaagccagttgaatagtctggctgtgttgaccggacagattgaagagcggaaacgctatatcatggctatcaacaatgatgtggaggctatccagcgtgagttggcttcattggagcgccagttgcacgggctggagaaggatttgaaagataaaaagaagaaatatgaagcttctgtccagtacttgtataagaataagtcgatagaggagaagctcatgtttattttttcggcaaagaatctggggcagacttatcggcgtatgcgatatgttcgtgaatatgccacttatcaacgtctgcaaggggaagaaatcctaaagaaacaggagcagatacgcaagaagaaagcggaacgtcagcaagtgaaagccgccaaagagaacctgctgcaagaacgtgagagcgaaaaggtgaagttggaagagcaggaaaaagagaaacgtacgttagtgactaatctgcaaaagaagcagaaaggattgcagaatgagataaataaaaaacgcagggaagccaatctgctgaatgcccgcatcgataaattaattgcggaagaaatagagcgtgcccgtaagcgtgcgcaggaagaagctcgtcgtgaagcggctgcccgtaagaaagaggaaagcaaggagggaaaatctgctgcaacggaaacggccgctaaatcgaaacctcttgaggcttataccatgagtaaggcggatcgggaattatcaggtaactttgccgcgaatcgcgggaaattgccaatgcctatatccggtgcttatattatcaccagccgttacggacaatatgccgtagaggggttgcgcaacgtgaaactggataacaagggtattgatattcagggaaaaccgggtgcacaggcgcgtgccatttttgatgggaaggtggcggctgtgttccaattgaacggattatttaatgtcctcattcgtcatggcaattatatttctgtttattgcaatctttcttctgcatccgtcaaagccggtgatacggtgaagacgaagcaatctatcggtcaggttttttctgacggcacggataatggacggacggtattgcacttccagttgcgtagggagaaagaaaagttgaatcctgaaccttggctgaaccgataattgaataaaaaacacgtagaatgaagttaactaaaatactaatatgcttgctgatcttctggaccggaacactatccgcgtctccttatttttcgttcaagaaatatcaggtagaagatggattgtctcataataccgtgtggtgcgcccttcaagatagttatggttttatctggctgggtacgagtgacggattgaaccgttatgacgggcggggcaataaagtgtaccggaatgttctcaacgacaaattttcattagaaaataatttcgtagaagccttgatagaggtggacaagaatatttgggttggaacaaactccggactttatatttatgaccgggataccgatcgtttctcttgctttgataaaacgacgcagtataatgtgtatatcagcagtgagataaaaaagattattaagacggaaaatggtcttatctggattgcgactttgggacagggattttttatttatgatccgaaaacagaggtgctgactcaaaatagtgttcagacatcttttgtatgggacctctgtcagagtgctgatcggaagagggtctatatatcttccttacaggaaggacttttgtgctttgacgaaaacggcaagtttctccggacgtatgaaatttcattagatataaatgcttctgatagttataaagtaaactgtattcagaatatcgatggagatatttggattggtgcgggaaacaatctgctgagtcgtttggacgaacgaaccgatgctatggataattacagtggttcggcgtttaatttcggagctgttcattgtttgctgaagtatacggataaagagctgttggtaggtacggataacgggctttatctgttcaatcaaaatacaaatacattccagcggacggataatccgaccgatccgagaagcttgagcgatcagactatcaatggcatgatgtgggatgcagaaggagctctctgggtgttgaccaatttggggggagtcaactatatgtccaagcagaccaaacattttgattattattcgcctgcctatctggccggagtgtccggagcgggaaaggttgttgctcctttctgtgagaataaagatgggaatatctggattggaactcaaagcggtttatatttcttccatgctgctacccgcgaactttctccttatccaatcggaggacatgataatcaaaagtatgacattcgttccttattgttggatggagaccatttatggatcggtacttatgcgaaagggatacgggttgtcaatttgcgtaccggagctgtgaaagtttatactcattctcgcgggattccctatacgatttgtagtaacgacgtattatgcttttatagagggaggaacggagaaatttacgtaggaacgagctggggtttatgtcgttatgatgccgctaaagataactttatgcccatcataaatattggttctatgatctctattaccgatatgcatgaagatatgtacaatcatctctggatcgctacttccagtagtggcgtgttcacttacaacacgataaatggtcattataaaaattatcagcacgaacgggaagactcaactacgatcaccagtaattcgatcattactttatttgaagatgtgaaaggaaccatgtggtttggaacgaatgggggaggactgtgttcttttgatgctaaggagaaaagattcattgaatttgacccgcataatactttattacctaacaaggttatttatgcgattgagcaagatcagggaggtgatttctgggtatccagcaatgccggaatttttaagattaatcctgttaccaaagatcatttccgccagtttacgattaatgacggcttgcaaggaaatcagtttatagctcgatcttcattgaaatcatccgaaggaaaattgtattttggtgggatcaatggctttaatgtattccagccggaacagtttgtagataacaaatatattcctccggtttatgtgaccgatatccggttgccttatcaaaccgatgagcaggaggtgaagaaactgcttcagttggataagccgctttatatggctgataaggtgactttatcttacgaaaacaatagcttctctattcgttttgtcgctcttagttttgaagatccggggaagaaccggtattcttacatacttcggggagtggacaaggaatggattctgaataccgataacaatatggcttcttacaccaatttgcctcccggtgagtatttgttcgaagtcagaggctctaataatgatcgccagtggaatgagaatactaccactttaaaggtggtgattactcctccctggtggcgtagtacctttgcttacttcgtttatgtcctcatgctgttgggatggatcggttggatggcttggcgatggaatctccgtgttaaacgcaaatataagcggcggatggaaaaatatcagattaccaaggaacaggaagtttacaagtcgaagattagctttttcatcaatctggtgcatgaaatacgtactccgcttagtttgatacggcttcctttggagaaattattagagaaagagcgtgaaggaaaagatctcaagtatttgtctgtgatagataagaatgtaaattatctgttggggattactaatgaattgcttgattttcagaaaatggagagtggtacgctgcatctgaatctgaaaaagagtgatattaaagaacttgtcagtgacgtttataatcagtttacaagtcctgctgaattaaaaggtattgatttgcaactgatcgtgcccgaacaagagctggtgtctacggtggatagggacaaattaagtaagattcttgtcaatctgatgggaaatgccatcaaatatgcgcatgcgcgtattgacttgaagctgcttgtcactgatgggggatatgagatacaagtgaacgatgatggtcccggaataccaaatgaacagaaacaaaagatatttgaggctttctatcaactgcctgacgataaggtggccacagcagtaggcactggcatcggattggcttttgcaaagtctttggcagaggctcatcagggagatttgcgtctggaagataatattggaggtggttcttcgtttatactgtctcttccggtcaaagagtgggagacggaaaaaacgggcgatattgtagaaatatccccagaacatgcggatgcttctgaaacgacctcttcggagtattcagggaagaagtttacagttctgttggttgaggataatgttgatttgctgaatctgactcgtgagtcattggcagagtggttccgtgtgttgagggcttccaacggtcgtgaagcgcttgaagtgcttgcgcaggaaaacgtggatgtaatagtgagtgacgttatgatgccggagatggatgggctggaactttgcagcaaggtgaagtctgaaatctcttattcacatattccggttattttgttgacggcgaaaaccactttggagtctaaagtcgaaggacttgaatgtggggcggatgtatatgttgagaaaccattctctgttaaacagctccatatgcagatcgagaatctgttgaagttgagacagtctttccataaactgatggtgagcttggcaggagatacggttgctgtttcgacaacggattttgcgatgtctcaaaaggattgtgagtttatagctaagatacagggagtaatagccgaacagttggcggatgagaacttctcgatagataccctgtctgaacagatgaatatgagtcgttctaatttctatcggaagataaaggctttgtccggaatgtctcctaatgattatttgaagacacttcgtatgaatagagctgctgaactgataatgagcggtacccggatttctgaagtggcagcgcaggtaggatttacttcttcttcttattttgcgaaatgttttaaagcgcaatatggtgtactgcctaaggaatatacaggtcagcctccgatttcaggtgaggcctgataaagaatagataaaagcatataaaaaaactcctgtcgtgcaatatcattggatattttccgacaggagtcaaatataaaataattaatcgagtactctttctaattaattgagtaggctttatttctttttttgtcccgggtaaggctctaccatgcaacgtttagcccatgcttcataagcctttgtcatttcagctactttttcagggtattgtgctgccagattatgcatttcgctccggtcctcattcaggttgtataattcccatttagcgttttctcccggacgaaccagtttccaaccgtcattagagaggaatgcacgttcattgtaatgttcgaatccaaggtagttatgtccttcacgatgtccggtcttgaagataggaaccagactcttaccctccaatgggatgatgtcatttcctttatatttggtaggataagtagctcctgccatatcgatgcaggtagccatgatgtccatcacatgtccgatttcgggagtcgttttgccgacattcttcttgatacctttcggccagtgagcaatcatcggagtacagattcctccttcataagatttggctttccaaaagcggaatggtgtgttggctacgtttgcccagcgtgctcccagtgaagcgtatgtggtttgtggaccaggcattacttccttgttgtgtggatagattattttcttcccatcacgagtcatgtcaggacggtcattttctcctggagagtaattttggcaattttcattactgcatccgttgtcagagaggaataagatcagcgtattatcaagttgtccggtcttttccaatgcatcgataacttgtcctataccttggtccatacgatcgatcatagcggcatgaacggccatggcgcgtgcatcccattctgcatgcacattgtcttcccatttgtcattgaattgtctttcagaaaggaaattatccattcccgggaaaatacccagttgcttttggcgctcataacgggcgttacggatagcttcccaacctactttataggtatcttcgtatttttttatgtcttctgggagtgcctgtagtggccaatgcggtgctgtataggccaggtacataaagaatggtttatcctcctttgcatactcttccacttcttttgctgcacgatccgaaagtgcctgtgtaatataatatccttccggtacttcttttacgggtacttctccttctaccagactgaatggatcaaaataatctaccactccgtaaatgattccatagtgagaatcaaatccgcgattaacaggatagtgacataagtcggagaatgtgtcatgaaaaacatgatgtgccagccattcgcgttgatccttgcgtaggggagtttcagcgacgtgccatttacctaccatgctggtagcatatcctgattctttcaatacttcagcgatggtaacagcattgcgtgaaagcgtaccacgataacccggaaggtgatcatcaaaggtcatgcgtccgattcctgcttgatgttgataaagtcctgtcaataaggaagcacgcgtcggacaactacggctggtgttatagaaatgattgaagcgtactccttgttttgccagtttgtccagattaggtgtgtgaatttcactaccgtagcatcccaggtcagaatagcctaggtcatctgcaagaattaccaggatattgggtctttgatcggacttttttcctttggcctctgctgcagaatgtccagcaaccatcaaagcggttggtaatagtaaaaatttagaattcataagtttaatgttggtttataatttgtttttcactgtattactcttttcctttgtctttgttttcctcaaaccatttacatactttcttgctcaactttgcaaccaaatcaggatgctcatttgcgatattattcttttcgaacttatccttttccatatcatatagttgcgcatcgcttctgtcaccgttcactaataatttccactttccactgcgtatagctaaatgggggcttctgtcataagggttcccaggaaagccaaaatgtttgtttcgtccgaaatcccacattaaatcggttttacgtttggcttccgatttaccgagaagaacttttgaatagttctgcccatcgcctttgtaacctttttctgttttgattccggctatagaacacaaagtcggatataaatctactgcgcataatacagactcgttatttacctgtccggctttaattttctttggatatctaacgataaacggcatacggattcccccttcataaagactatttttagttcctctcaaataagcggaacgtacagatttaaagctgggtgcaggaccattgtcgctagtgaaaataatgattgtattttctcccactcccagctcatccagggttttgatgaaacgtccgagttgtttgtccatttctgcaagtacaggagcaaatgcttcttgtgtttcccagctttttctttccttttgtttgaattccggtacccaaggggtatgcatatcatccggccatagattcaggaaaaaaggttcgtctttatgcttttttacaaactcaatacttttgtctacaaagtattcggtacgtctccaacgttttacactgtctttatccgaccagatccatttggttgcagtgattgttggatccggatccgggctttcgtaggttgatatgtattcgtcaaaaccgtaatttttaatagaaggagcattgtgcacgtcacgtccgcctcccatgtgccattttccgatgtgtcctgttgagtaacctgcattttggaaggcacgcgccatggaaggcaacttatcatccaggaaattacgttgttcgcatctcttgttcgcagctttgtcgttcaggaaagtgttgattcccacttcaagaggaaagagacctgtggttaatccacagcgggatggagagctaaccggcgcagaagagtaatattggttgaataatagtccgtcctgtgccagcttgtcaatattgggagtaggaacgaatttacctccataacaacctatgtcaccgatacccatatcatcgatatagataattactacattaggttttgtttctgcttgtgtgttagcaatggggagtagggctcccagccagggtaaatgttttttcagattcataattattgtgatttaattaacttcagtttttcatgatgacttttcgcaaaagtagggaagatatcagagaaggaaggaaaaatactaatcaataaaggaaaaaaaatggtagaatgatagattttttctttcttctattgggaaaacaggaatagagaagctcgtagaaaacgagaacttctctattcttctaattattctatgatacgatcattggagaaggtatcttgaatgggagctttacttcgccacggttttagtcagtaattgtacccatgagtatttagtgttttctacccaattatccggtgagacttcgatagtaccagtttttgctgttattttttgtatgcaaatcaatcctttctttccattggcagttttgaacaggtaaactttatctgcctgaatagctaagacttcggaggttggatttgctagattttctatcggagttgcatctacttgggagattgcattaaattctgcttgtgataaagaggtttcagcaaataatgtgtgttgtaaaccattaattgtcatcaagccataatcacttcttttagcaggtgaaacaagagctggtacagcttcgcttcctgaaggcaagataatatctccgagtgagaaatcgacttcgtttgtatatttcatggcatcagcagccatataagtgcgtccaagaagccatgttgcataataacaaccataataagctgaagctgtctctactatttctccatcttttccgtaatccggatcggagaataaaacagaaggagtaatctctaccaataagttacgttggtacgtatggccgtcggtacctagaacgactactgtaatacaggcattctcttttaaagaagtaaacttgtaagttgtttcgtaattagtcgttccgtctgcaaatgactgggcagtttcttctatcagacttccctgcattccggttttggagtctgcctgataaatttcaaaactcatgatttctccttgtactttgacggttgccgtgtattcagcaatccctttcgttaatgatactctattattctgatcgacacccgcaaattcgattttgacaggtgcttcataatcaacttcatatttatctgcacaaccgaataatccaaataaactgattgacagaattaatgcaattatactatttgttttcatgactttatttttttaagtaaacattctatttagattagtatcctggattctggtagatattcgggcagttattaacttcatcctgtggtattggagccaagttcatgcgctcgttatagtttcgcgtatctaaagttacccgttgatattcaccgttaattttctttattccgacagccggtaatctcattacattttttgctatcagccatcttcttatatcaaagaatcgatgatcttcaaaacaaagttctacacggcgttctttacgtatgcgttcccgaagggttgcctgattataatctgcggccagtaagtctgtcgtgataccggcacgacgacgtatcctgttaagctgggctattgctttttctctggctgtgttcgtatcttcagcttcattctcggcttctgcataatcgagcaggatttctgcatatctcatcattggaaagtccatgtaagtggtaccaccttttcgatgatcgatacggtcatccagaaactttgtcaggaagtatccgcttccccatctatatgattttgacaggtctattgtagctggcttaccgttgaccaaaggccaggtagcaccatcacatagaatgctctgtgccaaacggggatctctgttagcataaggagaattttcattgtaaccggagttcgggttaataatagctttcgtatttgattcgtaaccgagaatgggctgtgagccgtcgagcatatcataacagtctaccagccattggttcggacaagtcagtagctctttatttacattccagggatcaaaggcaggcatcattccgtagaggtcatttgccggtgcacggagaaatcccatgattacctcaccattggcacgggtattgaataatcgtgtgtagctcttttcgggagtggtcggatcttcatataaacgatagaaatctccattgtcagcatattcaatcatatcgtaggcagcatcagccgcttctctccaagttactccggacgcattgtgtaagggacttgctgcataaagtaatgtgcgtgccagatagcctagggctgctccccgggtagctcttccgtaatctgctgcatcgtatttgtcgggcaatactcccggctctgcaagttctttgaattcattagcaatccagcggactgtggtttctaacgattcacgtttgatttcgtcataaagtaacggatcgagttctttgtctccgattactaatgctccgtagaaacgaaacagttcgtggtgatacaatgcacgcagaaagcgtacttggtttttcagggaaatcttctctgcatcctccaatggtgaacggtctacgttgttcaggaatgtgtttgcagagcggatggccttatagtagaatatccatggatggtcaccgccaatcaaacctttggaagcatcaattccccctttgataaatttctcgagttcgggaataactgcccctccggcacgggttgtatttccggctccatcgtctgttgcgttgtcaagcatacaaggcgaaccaccaatgtttgccaaaaaaccaaaactgccaaggcggtctctccccatgcgcatacgtgcatacaagtcgtatgcaactttgcgggtcaatgtaatgtccgaataaactttctctgtatccgtaagatccagttcggtttctttcatcaggctatctgcactacaactggtaagcaggacagccgttacaaaggatataaatagttttctcataaattattcatttcaaacattagaaattcaggttgataccaaaatttattactttttgttgtggatagaattgtccattactattgttcgatgattcagggtctaccttctttacgttgtcccatgtaaagagattgtaggcattcgcatatactctaagtgaacgtactccgaattttttcaatagtttgcgaggtatagtgtaacctaactgaatgtttttcagacgcaagtatttggaatctttcaaccaatagtcagatttataataattaggatgcgcggcagtggctgctttagtgaaacgtgggtacgttgctgttgctgctgtttccggtgtccatcttccgatatgctcttcgtaataattaccccagaaattatcccatgcaatatcctgttgcagatagatggatgaacgggcagctccctgaagcaatatactaaaatcaattcctttccagttcaaaccggcagcaagagagaaagtcatttcgggtaccggattatagccgataggagcttggtcgttagaatcgatcactccatcatgattcaagtctttatatttaatatctccaggtcggcttacttgtccgaattgaacgggagaacttgctacatcttcataagagctaaagaaaccgtcggaaatatagccgataaactgtccgataggatttcccgtttgtgacatataggcatagggctttacagattcacttttctctacaatttcattgtgtgcatatccataaatcccttttatggaatatccgaaatctcctttttgatcttgatagcctatttccaaatcatatccctgatttgttacgacaccatagtttatgggagccaatccgtttgaaccggctgcttgagaatatctttccggttcacataggatattactacgacgctctttaaaaaagtcgatactggcagatattttatctttcaaccatttggtctcaagtcctaagttatatttccgtgcaacttcccatgtgatattttcattggcgctttttccttgaatcagacctttaatcgcaggattatgtgtctctccaaaagtgtagcctagtccttcatcgtatcctgaacgataatagtaagagaaacctcccagcttgtcattaccaacttcaccataagagaagcgtagtttagtaaaacttaagatagggttttctttaaagaaaggttcgttagtcagtacccatcccactgatgctgcaggaaagagctgataacggtgtccttccgcaaaacggtttgagccgttatagcctgcgttaacttcgaatagatagcgattctcataatcatagttcacacgtcctactaaagcctgatagatatgaggtacataagaatagcgtccaccgggagtggaagtgtaactcatattataaagtaccagtccggatatattatgcccggagaaagattgtttataacgaactgccgcttcagcatacttgcgatgtgtagctgccgttttattggtggcttttgttggcaacaccatttcaagcccttgtttataagttccgtttacaggattatattgatagatattgggacgctgctgtatgcttcggttattgctccagcctgcatcgtaagagaattttccgtctatacttaatccttttaacagttttcttaggttatatttaaaagcaaaatctgtctcaagtttgttattgaaattaagaaaaaatcctgaatagcataatgtcacgagtggattctgtctccatataccatcggcggcggcataagttccattcgcgtttaagattgggaatgcttgaggagaattgcaatagaacatgccgaacagacgcagtgcttcctgtccgtcagcatcatagccataggggcggttctgacttccgaaacgataagcaagattcacggataccttgaaatcttcagttaggttgatatcgatattcgaacgagtggtgagcctactgtacttatattccgaattataaccttctttgtataagccttttgctacatcgggtgaggctgctaaaagagcttgtattgtctcatgttctttaattttgtctacgtctgtctcaaacataccggtttgagtgaagtatcccacagagacgaagtaacgtactgttttatttccgcccgataggtttacattgtatttctgttggagaccatttttcgtaaacatatctacaaagtcattgtccgggtgtgtaaacggacttttctgggtacgatatagatagttgtcatattctgacaggaaaaggccgcgagtattaccggtatcggaagggtcaaagccatcattgatagcaccctcacgcatgaatcttgaaacggattctgaatttagggtttgggatatgcgattgaaggaagtaacaccaaattcagatgagaaagaaatttgagtttctccttcacgacctctccgggtagttaccaatatcacaccatttgctcctcgtacaccgtatacggctgttgcagaagcatcctttaacacggagatagtttcaatatcatcagggtcgatttgcgccataggccgttctaccccgtcaatcagtactaaggggctagagtcgttcaatgaagcacgaccacgaacaaacatcgtagcctgatcaccgccgggacgtccgctctcttgtcgggttactagtcccgggatgcggccacctaaagcgtttgtgacacttgatacaggcatgcttttcaaatcttcggtcccgacattagaaatagaaccggtcagagatacttttttctgtgtcccgtatcctactaccacaacttcatctaattgtgcaatgtcttcttccaaggtgacattgataaaaggatgattcttttttatggcaatagattgttctataaagccgatcattgagataagaagtgtttgctctgcttcgttggacaatgtaagagtaaatttgccatccaaaccagtcactattccattattagtccctttctgaaggacagtagcgccaatcatctccattccttgggcatctttaacaattccgctaactttggtttgtgcacagacatgccagatggagctggttaagcatatgaataatattattatctttttcatgttttctatctattaaatagttttgatgcccgttaccaacctggattctgttggatggaagggctttccttgattactttcagaggaataggatgataatacatgtaatctttaaaattgcgtgcttcatctactgtaatgcgtgtataatgaagcccggaagcattttcttctactttcattccgataataggttctctaagttgattgccatccatccaacgtcgcaaatcgaagtaacgatgttcttcaaaacagagttcgatacggcgttcttgcttcactttttccataaagttgttatctgtcaccccattaagaaatttatcatttgttccgaatcctgctctggtacgtattttttgtacggcttctattgctgtcaaaccatagccttctggatccgcattcatgccgtaagcgtggtgcatggcttctgcgtaggaaagtaggatatcagataagcgaatcatcgggaataagtggaaaacggtacccacattggcctgtccgaagttcagtgttttgtccaggaatttagctaaataatatcccgtattggtcgaacggttcttcacttggttgagtccgtctatggttgtgttatcactaattcgcgtataaatggtattctttccataaaccgaaccgtcatatccgataattgctgtcaaacgcgggtctctgttagtatacatgcttgcaccgtcagaagaatgggtataatcgcttccatctttcatggtaaatgcatcgatcaattgctgtgaaggtactgtacctcctccctgatcttttgagattgtagggggataatgtctgttttccagaccattgtccttagcagccgtatagaataggatatattccggattaggattggcattgataaagatcttgtcgtacgttttagcagcagtaagagctatcagactatattttttatttccattcggagatattgttccgtctgcatttagattgattacatctgcacaagctttggctgcaagtttccaacgttccgtcacatccgagccgtcagtatagcctagtagtggatcgttattatccgttctgttgtagagtgggcttgcggcatagagtaatgtcttggctttaatagcaagtgccattcctttagtcatacggccataagaaccattcccaccttccggatcaactttcaatacagcggcagcactctcacataactgtacgatgtgattgacgcagtctttgaaagagtctcttgcctttgtctgcagttcaggatcgtcgacttcgtaaatacgatcgacaataggaaagcctccgtagtgtcttaacaggttaaactcaaataaggcttgtaaacattcagtttccgcacaataggtatctttaaatgtctggatgtcttcttctgtcttattttgtaacaccaagtcagcctcacgcaaatatttgcgggcaaaaatggcctgttgaattcccttgtatgacttattccaacattcttcaatcggatttgaagaagtgacatacccacgagacaacttatgaatatccgaatctatgattgtacttattccatcattggtggctgcatctaaaaaggcatttcctacgtggttgaagccttcgggaatatatgcatacacctgattaatcggtttcagatagttctgttcattcgtaaaaatatcatcaggctgggcccagtcatagggcatgtcatccagataatcacaaccggaaaatgttagtgttgcgcttattgccaaataaattatcgattttttcatgctatcagaattttaaggaacaacctatactcatgtttctcgtcaaaggagctgccagtgaaggagcttcaggatcaacccatttatattttgtccaggtaatcagattcgttccactaaggaaaagcctcaatcccttaagatggattttctgtatcatttttgtaggaaagtcataggcaacttccagtgtttttaatcttaagaaatcagcatctttcacatttaatgtacttatctgcctgttattaagattggcattgtccagtgttgttaaacgtgggaatgttgcattctggtgttcgggtgtccagtaatcaagttgatgttcaaatatggttccgttatctgtgaaaggattcatcacaatgtccgaatattgatgagagacttttgcggctccctgaaataatgcggtgatcgaaaatcctttgtagccgactcctaagttaataccatacatgattctgggaatgtctccgtaaccgataggtaccatatcgtttacatcaatctgtccgtctttgtttatatcttcataacgtacatcacctggttggacatcagagaatgtttgtacaggagaggctgctatttcttcccaagaattgaaaaagccttttgcaatgtatcctcgattttctcctaaaggccgtccctgattcttcaaccattcgtatggctgatctacttcaccgtttgcaatcagttcattcgtagaataagagaatgtaccacctatgaaatagctccagtctgcaatatttgaattccacatggcagataagtctactccatggctattgattttgcctatattctgcttaaattcctttacattgccgacaagagaactgattttgttatttactacatacatatcatgacggttgtctttaaaaaattctgctgtaacagataaccggtctgaaaatagtcgggtatctattccgatattcagaattctagctttctcccaagtcaatccgggatttggaagtatatcctgaatgtatcctccaagctttgttcccatgtttacccctgtgatatagacttcgttttgcggccacatacgtcccctgtaataaaaggcatctacgccggatgagttgccgacttgtccataagatgcttttagcttcaggtagggcactattttttttgcatctttccagaaagattcgttagaaacagtccatccggcagatattgtagggaagaaaccgaatttgtgtcccggaccaaatttgtgagatccctgataagctccgataacatcgatgccatatcttttatcataattatagccgaaccaactatttacgctttggaagcgggttggcaataccatttcatcattgctttcatattgttcatagaaagctaaagccgaaactccatgttttccaaaggtacggttataatctaattgagccacgataccggtccggcggaaagaactggtattatctaccttgtttatcatcgagtcatcttcgcgggtccggcggagaacattctcattcgtcgcatccttttcgtaatatgcgaaagttattgtacgtctgatagaagaaattgtgcgtgaatccatggatagagcaacagaagcttttaatccctctgttatgaaggaaagatcctgtgagagttttgtacggaaagaaccatacaattgtttgtcctggaagtagccggagcgatttagcattgcccatggattttcacggaatgcatttcctgctacaattttcccatcttctgcattgataacattgccgtattgatctgtatatccttggtcattgtaccattctgggaagattccttgcggtaatgtgactagattattatagatattttcggctccgctgccagggccattctgactttgataccagccatacagatttacatccagttgggtagttcgagttacagcaaaatcgatattggaacggatattaaaccgttcagcagagtgattggtattataatcatgtgaatcatctgtattgaagtagccattgttacgagtatacattgcattcacgaaatatgtacttttttctgttcctccttgaatattaagattatagcgttgactccatcggatatccttcaaatatttatcagcccaatctacattgggatataaaatggaattaggatcattcttagcataattcattatatcatagttcgaatacaagggatccagattgtcattatggcgggctatgttgtgctgtcttgcataatcggctgcgtttaatgactttaattctttaagtggttgttgagctataatttgagctgtcaattcaacctgcggtttcccctttgctcccttacgagttgtaaccagaatagctccactgcctgcacgcattccatataaggctgttgctgcagcatctttcaatacggtaattgattctacttcgtgtgatgacaaaacagcaaaatcccgttcctgtccatcaaccaatactaatacatcgggcgaattactcctttgccctcttatccagaatgaattctgttcattcactaatccaccaccttgcacttgtcgggcaaaataaccaggtaccagtccggctaatactgccgaaagatttgtaacaggtagattgcgtaactgtttacccgagattgtgtaggctgaaccgttataatctcccatagggagtacacgatatcctaaatccaagggtacatcttctttgttttggacattttgtgcctggcatatcaaatagccaggaagtagcccaaccaacaacattttttttaagaacttcatatgtacaatttttaagttaacgtcatagtaattttattgattattttgaattttgtctattaataccttcatccagtatcctccgatcaccgaacgagctctaaagccaacccatcgtccgctgtctgtatggtgccagtcgctgataggtacacgtgatactgtttcattgatatatttatagacaggatcagagaatttctggaaggtttccttatctgaagacatagccgccgtccacatgatccagtcggattttgtgtattctttacgagagtccagaggaagcccgtaaggattctgctttgtcaagtaatagttaatctcttttctgataacattattagggaataaattcaggttccacaacttatcccaaaccatgttatatttttgactccaggtatctttacggtcaaaagccagacggtaatgatctccctcattcgccatttcttcccatttcactgccattttcttagctataacagcatatttttcagctacatcattcaatccgagcatccgagccatttcgctgtatccggccactcccatgatagcttttacagaaagattggcattgtgtgcccaatgtccggcgaagtcatccgtgcaaagttggttttccgggtcctgtccagactaaattgttatttgttaactaattgaaatacaatagaatacattcatgctgtattgtctttgtgttgttgtggctattaaatgaaatacaaaattctaatttatgagcagacttttaataaataaaaagttaatggataaatgtagtggtagtctaagatgagaaatggactaatctgaaaaaatgaatatttttcctctctctctttccatttatctatgtaatttcttttatgacataaaaactagcagcattttaagatattaagaatcaaatagattgaataattactcttgttgaatgaattcgacgtaaataaagctttctggaatgatttatctatctttttatgctattttgcagagaaatgttattgtgtgatagcttaaggtaataaggaaagtagatgttagaaccccattcaggagtccatagtgtggtttattttaaaccaataagtagtttcttttaaaggtaagagatgttccttttaaaccaacgacttgtttcattatatcaaaacatcttttcgatagtaggaaaaagtacatatttataaagaattatgctatatattcaataaaaagaatatatatgatgtaaatgtgactttcttttttctatttagcaactcaatagaatcttaattcttctgcatatatgaaaaatagaacataatttgaaataactaagatgaaatatttcaatctttacctggcaagtttagctcgaagttcttttagtctttttgcagcctgtagattatccacctttatatatctcatgaatgcagatggacttttatgcccggatatgcgcataagttctccggcaggaaagccggataaatacatatttgtgcaaaacgatcgtcggcaagtatgagaagagatcatctcccatttttcatagactctcttttcccgttcctttccttttttgcgaacaacttcaattttttgttttaattttgctcttcgccccaattctttaactctttcgttgaatatatatctagggattttaggtaaatcatagttgtatttcttgagtatttccggtacataatcaatcatagggattatgacagctttatgcacttttctctgtttaagatttataatctcattatctaagtcaatatgttcgggacttaatgttgagagatcactatatcgtagtcctgtaaaacacccagtaataaaaacatctctaatctcttccaattgcttatcatctgacaagtctaactcgtgtattgttgaaagctccttttcacttaaataaatagcatcagtttcttcttctacgaccttaaaatgcttcaagtcaattggaggaataactcctttatctatttgataattaacaaatccctttaacaaacgtataatttttcctgcagaattagtgagcaagccaacactcccatcgggctttataaccttataaaataaataatccatgaattcattataaaatataagattcaggttatgaaaagtaattggttgcgatgaatgttctttgaaagcgatcagatgtttacgaagtgttcggtagtcttttatttgatctgcagaaacaactggagctttttctgtaatatatctttctaatgcgtcaaatatatctacccgattaggacgtaattcatattctctatttttttttaattcaagtaaaacaaaatctacggttggacttattccgtttatcttagcatatgtaagaatttctccaagcttggacgttattctaatcaggcaggcatcaatttcatcatagtttggacaagcgcgcttaatccatctctttttagaatcccagtgttccggtttaatactgtatccagtagagatgagcgtacgcttagttcgattgtagttatatcgaacatagaggacagtagtcccctctcgagtgacgtactttggtttaatatatggagtatattttgcgatagtaaatctgtattgctttcgtattgcaaaattacaaaagctattcgatatgagcaatatctcatcgttaaaagctagaacctccaaaaacattgtactatcttaataaaagtggataaatattgctcaaaaaggaaaaaaactactcaaagcacactgtaagagacttattttgcactttaaaaacactcaaaatttgaaaaaagaatagattttgtcctttcttgaacacagattttcctaatatttagcattaattccattattttgtagcgttacaaataaaatgctatggaaaaacaaatggatttgtatgactcctgggtcctacctgaaacacacaattctatataaacttttcctctagcatttataaatattcgacagtactgattttaatatattatttaggtatagcgataagaaaggtaagattgcatttaaaaggtaatagtaagaaggtaaaaagagaaataaaagaaaacgtagggtttgtttttcttttataggtaaacaagattgtagatgggtaaccttaaaattgtagattaattagaaaatatttatgaagaaactactaacagtaatggccttttcggtcggtttattcgcaaatgctcaaaccggcaacttatttaaaccagtaaaagaggtagcgttacgtactccatcggtacctatcgttgtttcagatcctcacttctctatctggtctccctatgataaattaatggaaggaagtacagaacactggactacagctaagaaaccattagtaggggctttacgcgtagatggtaaagtgtatcgtttcctgggtaaagatcaagtagctttaatacctattgctcccatgacaaatgtggaacgttgggaggctgcatatactaatagtcaaccagcaaatggatggcaagaattccagtttgatgatagtagttggaaaaaaggtaaagcagctttcggtagccgtgatatgccacgtgttcgcacagaatggaaaggagataatacagatatttatatccgccgtacatttgaaataaatgatttggatttaacagagaatatttttcttatttattctcatgacgatgtattcgaattatatttaaatggagaaaaactggttgctacagatctcgtatggaagaataatgtaaacctaaaactttcagatgaagccaagaaaaaacttcgtaatggcaaaaatgtgattgcagcgcattgtcataacacaactggaggatcttatgtggattttggtttatatcgtgaaaagaaaaatgcagtaacatttgaaaatgaggctgtacagaaatcggtagatgtactagccacttccagttactatacattcacctgcggacctgtcgaattagatgttgtatttacagcgcctcaattgatagatgacttggatttgttgtcaactccgattaactacatctcctatcgcgtgtgtcctcttgataaaaaagagcatgatgtacaattctatatagaaacgactccggtattagcagtgaatgagactactcagcctactattgcacgtacattatcgaaaaatggtattagttatgtagaagctggcaccatcaaccagccgatatgtgatcgtaaaggtgatttgatttgtgctgactggggatatgtatatcttggtagtgtaaatggagcaggaaaatctataagtttgggtgactatagcggaatgaaggaagcttttgttaaaaatgggactttagcttcaagtaagaccaaatggattactcgtcgggaagaaaatactcctgcaatggcttatgtacataattttggaactgttaccaaagatggtaaagatggtttcttgatgatcggttatgatgacatttattccattgaatatatgtatgagaaacgtatgggatattggaagcatgatggtaaagtaacgatttttgaagctttcgaaaaactaagagataactatcaatccatcatggagcgttgtcgtgcacttgatgagcttatttataacgatgcagaaaaagcaggtggtaaaaaatatgcagaaatatgctctgcagcctatcgtcaagttatttctgctcacaaactatttacagacaaagaaggcaatctgatgtggttctctaaagagaataacagtaatggttgtatcaatacagtcgacctgacctatccgtctgctcccctgtttttggtctataatcctgatttacaaaaggcaatgatgactagtatctttgaatatagtgctagcggtcgctgggataaacctttcgcagcacatgaccttggcacttatccaatagctaatggacaagtttatggtggtgacatgccgattgaagaaagtggtaatatggtgattctaactgcagctatttcgaaaattgaaggtaatgcagattatgctaagaaatattgggacattctaacgacatggaccaattatttagtagagtatggacaggacccggaaaaccaactttgcacggatgacttcgccggacattgggctcataatgccaatctttccgtgaaagcgatcatgggagtggccggatacagcgaaatggctcgtatgctcggattgaatgatgtagcagacaaatatgctttaatagcccaagaaatggcgatgaaatgggaaaaaatggcaaacgaaggcgatcactatcgtttggcttttgaacgtaagaacacttggagccaaaagtataatatggtgtgggataagttgtggaatttgaacctattccctaacaatgtaatcgaaaaagagctcaattattacctgactaaacagaatctttacggacttcctttggattcccgcaaagaatacaccaaatccgattggatcatgtggacggcagctatgtcatcagacaaggaaactttccagaaattctctgatcctgtttataaatatattaacgagacagtatctcgtgtacctatcagtgactggcatcatactgatagtggtaagtgggttggcttcagagcacgttccgtgattggaggatactggatgcaagtgttaatgaataaattgagtggtagcaagtaattttctattagggagtgatattatgtgtaacttatctactgtatcaattcttcgatggaatctagtaatgctattgagcacactattctggttttcctgttcgacaagcgataataatgaagagtcgaatggaaaagaaggagatgagactaatgtatctgtgtatttacaacagaatggattccagaatttgaatctagtgcccgaccagaatttcgtttcatacaatgtgcttgtttgcaagagtacccttttgaatggagagatatctgttcgattgaaaacttggagtgacagtgaattgaaagcttataattctaacaatggaacaaactttcaactgcttccagaagatctttatcagctagaggaaatgttaacactgaaagcgaatgagaaacaaaaaagtatagaaattcaatttcattcctctgaaatcttctcaagatggaagagggaaaaaactaattatgtactccctcttcggttagaaagtgcatcggttagcgctcaagaaaacaaaagaaatttacttcttacgatagatgtccaagcagctattgtcaagttggagagtattagcggagaaatactattaaaccaagaaaaagtagaagtagacattaaatcttattatgattttagtggcacaaaccagagtacatttcattgtacgttaagtgttgcaccagaggctgtacagttggtaaatgattataatgcagctcatggaacatcttatgagttgctacctgatgactcgtatactcttggtgggttgacttattctgcagggaataatcaagcttctacgaaattaactattcaatcaactaaactacatcctacgtactatctacttcctctgtgtctaacgaatgccgatagcgaaacagtgttaatagataagtctgtccggatattgacattagtgcgtggttattgcaatccgattattgcttttagcgcaccagatcctacagtaattcgtgcccaagatggttatttctatctctatggaacagagaatactcgaaatgttcctatttatcgttccaaaaatttggtgaattgggagtataagggtacagctttcacggatgctactcgccccacttggggtggcgaccacaatatttgggcaccagagatacgttatttcaataatcattatgtgctttattattcatgggctatatggggagatgagtggagaagtaatgtaggagttgctgtgtcagactcccctctaggaccatttatagacaaagggtgtttgatcgactcgaaagtgattggggtacaaaattccattgaccagttcttttatgaagacaatggcaaaaaatatatgttttggggaagttttcggggtatctatgctacagaactcacggataatggtctggaaataaagaaaaacacggatggaaccccagtcctgaagaagcgtatttgtggaaatcgttttgaagggaccaacatatacaaacgtggagaatattattacttgtttgcttccataggaacttgttgtaatggagcaaccagtacatatcaaactgtggtagggcgttcaaagaatgtgcttggaccttatttagataagacaggaagggatatgttgtatgattattgtgaaatcattatgagtggcaatgaaacttgggcaggacctggacataactccattctgattcaggatgatgtaggaactgactggatcatctaccacggttacaagaagaaagaagccgaaaacggaagatatgttttaatggataaactgatttggagtaacgatggatggccttccgtcaagagtaacgcaccttccatcttggaagtggcgccctactttcagaaataaatatcctatacagaaaaacaagtaatacttattgcttatgcgattttattaacatatttaatctaatttattatgaaacaaaaagtaatgaaagcctgtttgggcattttatggggaatgtttacattgaccacttttctattacagagttgcgataatggaaaagaagtcactccggctcaaggaagtggtggcagtccctttaatccgcagcttcctattagtgtcaaggaaatcagtccgactaatggtgctgcaggtcagaaggttcttatttatggagaaaacttcggcaatgacccgtctctgatagaagtcactatcggcggacagaaggcgcctgtggtcaacgtacaatcaactgtcatatattgtattgtaccaacgaaggcttattcgggtgaaatccaggtaactatcaaacaaggagaagaaatctattcagccgaggtagccgaagttaagtttgaatatcaacgccaagtggtggtaagttccttgtgtggtgcaactagtgagcaaggttccaattcagcaaaagatggtccgtttaatgattgtggctccattacgaatccctgttttatgacttgggacccggaggaccataatttgctatatgatgcagaagacgcaggagacgctgaaggtgtaggacaaggtattcgttgttttgacttcacaaacaagcaggtctatacaatgattcccaagaactcatttgtaggctcacagcgttgccgaaccattgatttctataaagatgacaatggaaaatatcacatgattgtaggattagcgcaaggaaatgttaatagtacggctgttatgatgttcgatcgaattgaaggaggaacgaagccgtgtgggttcacgtggggcaatggaagggtgatcgtacagaaccaaggatgccaagctgctgcaatacatcctactactggcgacctctacttctccaattaccagaacagtctgctttatcgggtaaagaaatatgttatagaggaatttgcaacaggaaagagaacaacccctgtcagacctggtacagcagatgatgccgctcagacaatattaaaagtgcaagacaaagaatgggagttcaatattatgattcatccaactggtaaatatgcttatttcatggtcatcaatcgcaattatattcttcgctcagatttcaatggggaaacctttaccgctccctatgtcattgcaggtgttaatagtaacaaagacacttatatttatcaggatggggtcggtaatcaggctcgattcggtaatccctactctggtgtatttgtaaagaacccggaatatgccggaaattcggatgaatatgacttctatttgacagacagacataatcatgccattcgtatcttgtctcctttgggtcaagtgactacctatgccggacgtggtagcgctagtttgaattcaaacccatgggggtatgcaaatggccgcttacgagaagatgcacgttttaatcggcctaaaggaattgcgtgggatgagcgtgataatacgatatatgtgggagacgccaacaactatcgaatcagaaagattggccttgaagaagatattaatgaataaacaccgtataaaaatgaaaaaaataacaattttatgtatactgttgctatgtgtagtaaccggcacaatggctcagaaaactgttactgtatcgggtattgtttctgacagtaataaggaaccgcttattggtgtgaatattatcgtcaaggatgttcccggattaggagccattactgatatcaacgggaaatataccattaaagtagaaccttataaccgactggtcttctcatatattggatataagacacaagaagtattgattaaggaacagcgttcggtcaatataaaaatggaagaagatgtagctactactattgatgaggttgtaatcacaggtaccggtgcacaacgtaaattggtacaaaccggtgccatcactacagtagacatggaacatctgatggctaatccgtcgtctagtgttgttaatgctttggcaggtaacgttgcaggtgtattagcccgccagacttccggtcaaccaggacaaaatgtttcagaattctggattcgcggtatttccacatttggggctggaaccggtgcttatattttggtagatggattcgaacgtagcatggatgaaatcaacattgaggatattcaagacttttctatcttgaaagatgcttccgctactgcaatatacggttctaaaggagctaatggcgttgtattgattaacactaagcatggtaaatccggaaaaatcaagattgacataaaggcacaaaccacctacaacatgcgcactattacacctgaatttgaagacgggatttcgtatgcaaacttattgaatgagtcacgaattacacgcaattatgaacctgtatatcaaccggaggaactggagattctaaaaaacggattagacccagatctctatccgaatgtggattggatggatttattgttgaggaaaggctcatggcaacaccgcgttaacctgaatttaagcggtggtggttctactgcacggtattacgcctctattagttaccttgatgaagaaggcatgtacaacactgataaagcgttgaaagacgattacaacactaatgcaaactatcgtcgttacaactatcgtctgaatacagatattgatatcacgaaaactacactattaaagttaggtgtatccggttggttatctaagagaaacagtccgggactgggtgatgcagatgtatggggtgaactttttggctataccgccattcgtactcctttactttattccaacggtcgtgttccggcagtaggtacaggcaacaaaacaaacccatgggtagcagctacacagactggattcaatgaaaactgggaaaatgtgattcagacaaatattacgttggaacagaatttgaagtttatcaccaaaggtctgaaatttgttggacgcttcggctatgatacctataataacaatcacatcaatcgtcgtaaatggcctgagcaatggagtgccgaacgttcacgcgatgaaaatggaaatttggtattcaagaaaatttcggatagtagcaatatgcatcaagaaagtggttctagcggtaaccgtcgtgaatttttagatatgatgcttaattgggaacgcggttttaaggcacatcatctcaatgctacgttgaaatacacacaggactcgtacatcaaaacacaagacttaggtgatgatctgaaaaatggtgtcaacagacgtaatcaaggattggcagggcgaattgcgtataactggaactatcgatatttcgtagatttcaacttcggctataatggttcggagaatttcgcaaaagggcatcgcttcggtttcttcccggcatactctttagcatggaacattgcagaagaatcatttatcaaaaagaattggaaatggatgggtatgttcaaagtgcgtttctcttatggtaaagtaggtaatgataagattcgtcataacaatgcagatgtacgtttcccttatctgtacgcaattggcgagggcaatagttatgattgggcaaactacggtagttcttatggattcacaggattaacttacacaggactagcttccgaccaagttacttgggaggtggcaacgaagaaagatttgggagtagatttggctttgtttgatgacaaattcaaattgacagttgattactttgatgaaagccgtagcggaattttcatgcaacgccagtatttgccaggtatgattggcctgcaaggaaagagtccttttgcaaatgtcggtaaagtaaattccaagggattcgatggcaatttctctttcaaacagaagttcaatcaggtaagtttgacagtacgtggtaatatgacttacagcaaaaatgagattattgaaagagacgaagctaacaatgtatatccctatcaaatgcaaaagggctatcgagtgaaccagaataaaggattgattgcattaggactgttcaaggattacgatgatattcgcaatagtcctactcaaaagtatggtcctgtaatgcccggtgatattaaatacaaagatgtaaatggtgatggtgtagtggatgacaacgatattgtagcagtaggagctactaatcgtccgaatctgatttatggtcttgggctttctgttaaatggaaaggacttgatgtcaatttgcattttcaaggcgcgggcaagtcgcagtttttcttgtccgggaaatgtatcagagctttcagcgaagggcaatggggtaatattattaaaggaactttggataatcgctgggtagatgcggatactgccgagaaattaggtattgcagccaacgaggatcccaatgctactttcccccgcctaagttacacggaccaaggaaatggaaatacaacgatttatgcttatactaataactaccgcaactctacttactggttgcgtgacggttcctacgtacgtctgaaaacggttgatatcggctacacacttcccaaagcactggttaacaaaatacattttaataatgtacgtattttcttgactggaaccaatttacttacatggtctagtttcaaactctgggacccggaaatgggtagcaataatggagagaaatatccattgtccaaatccgtaacgttaggtttgagcgttaacttataaatgattaatgatatgaaaaaaatatatatactattaatcgcaatttttgcgatcagttccacttcttgttccgattatttggattctgattacatttttgaggatagagaaacaattgataaagtttttaccgactataaaaaaacagaacaatggttggcacaggcgtatacctatttgttgggacaatgttgtgatgttgcaagtaaacgtaatacaccttttgtgtttgatgattgcatgtattatggcgatgatgatgttacagtggatgcaaccaaaggcggtgctttatcttataataaattccgtgaaggagcatacgatgaaaacactttccaagatacttggaaccgttgttataatggtattcgacaggcttctattttcatccagtatgcagatatgagcattgagcatagtgcggaggaaatcattgacctcaaagcacaagcccgctttgttcgtgcctattactattggttgttactccggaagtatggtcctattccactggttccggatgagggttttgattacaatcagtcatacgaagatttggaacttccccgcaatacatacgatgaatgtgtagattatatcgctaaagagatggtcttggcagcacagggtttacctttgaaaagagaccagctttccattacccgtcctactcgcggtgctgccttagctacccgtgctttggcaatgctttatgctgcgagtccgctaatgaatggcaacgatgatgcgtatgcacagcaaatggccaaccgtgacgggaaacgtttattaaatcctgtatacgacaacagtaaatgggctaaagcagcagctgcttgcaaagatgtaatgggactaggcgtttaccatatttatacagccgatttccggtcgactcattctattgcttttcctgctaccatcgctcctccgattcacccggaatatagttataaacattttcccgaaggttggcagaatattgatccgttcgaatcttatcgttctctattcaacggacaggtaactgctatggacaatccggaattgatttttactcgtggaaagaatatttccggtgaacgcatcaaagatatggtcattcatcaattgcctactgtagctaaaggatggaatacgcacggtgccaccatgaaacaggtagatgcctattatatgagcgatggtactgactgtccgggaatgaactctgaatatgcaggcactccagcttatcaaggacgcatagatactcgccctcgcacaactggttatacaacaaataatacagatcacaaaccgcttccaaatggagtatctttgcaatatgctgaacgtgaaccacgtttctatgcgtccattgcttataacggtatgtactggcatctaggtaatgaaccagaagttcagaatcaagatcaacaagtattctattatcgcggagatggaaatggttatgcaaatagtatgttctggttgcgcaccggcattggggtagctaagtatgtgcatcctgatgacacctattataatagcgatgcagccaaggtaaaagataaagatgaaccagctattcgatatgctgatatcctgctgatgtatgcagaagctttgaatgaattgactactagttatgaagttccttcttgggatggctccatcacttacacaatcagccgcaacgtagaagatatgcgtacaggtataaaaccaatacgcatgcgtgccggggtccccgattatgatgcagatacatatagtaacccgattaaatttcgcatcaaactaaaacgcgaacgtcagattgagctctttgctgaaggaaaacgctactatgatcttcgacgctggaaagatgcggaagtagaggaagcaatgccggtttacggttgttatacatttatgagtaatgccaataaaggcctgttccacacaccggttcctatatcaaatctttctgctactttctcaccgaaaatgtatttttggcccatcaaacacagtgaactgaaacgaaataaacttctgacccaaaacccgggatggacctacaatgattaatctaaaaaaaactagaatatgaaactgaaaaatatcttattatatctgttacccatagccggcttatgtagttcgtgcaatgatgaatgggaaaatgaacagtttacacattatatatcatttaaagctcccattaacagtgatggtgtatctcgaatcaatgtacgctatagatctggtgatgaaaagacgacatttcagttaccagtcattgtgagcggatctactaccaatgaacgtaacattacagtacatgttggtttggatacggataccttggaagtactgaaccaagaacgcttcaataatcgtaccgatttatactatcaagtattgccaaagaaattctactctcattcagaaacggtgcagatcaatgccgggcaagatgtagcattaatgcctatcgacttttcaatggagggcattgacttatcagacaaatgggtattaccattgactatcgaagaatcacctgatggaaactataccccaaactatcgaaagcactatcggaaggcattgcttcgtgtgatgccattcaatgattattcaggaaactatagtgctgtaaattacaaaacatatttgaatggttcagaaacagatgcaccatacgtgaagaattatgttatgatgtatgtagttgacgatgaaacgttattcttctatgcaggtttatttgatgaaactcgtcaagacaggaaaggatatcggattaaagcaaaattcaacaataatggaatggttacgctttctccggcagaccccaataataaaatgcagtttgcgctcggtaaagatgattttaataatgagatcactgcttcttacagtatcactgagtcaatggatgctatccgtccttacttaatgcatcgaaccattattatcaataatatcaactatacgttcaaagactatacaacgattcccggtgtagaaactgaatttcatgtaatgggttcgttgacattagaacgtcaaatcaatactcaaattccggatgaggaccaagctatcgaatgggaagaaggaaactaaaggttgaccgaaaaataaataaactataaatggggattgtaaatgctgtggatatttgtaaatatccacagcatttcaatcgtttattactaatcgcaatgaataaatatgtattgtttttaatttttatattttcatgtattggctgtggagaaacaaatgaacaggatgccaatacaatagaaggtaacaccgatacttcgcaaataacaattgcaccagtgacgaatttgaaggctaagattacacaaaatcccaatgaactttatctaacatggacgaatccgattactgtgaccaatatgctaggggtagaaatctattataaacagaaaggttccaatgacgaaaaaagagtgaatacgatccagaaaggagaagggtatgtactccggttgacatccgcagagccttatttcatatctgttgttgtggtggataactacggaagaaaatcagaaagagtcaccattactgctattccatcgaataagggagtgcctttggcaaatagttgtacgtatgtgcttattgaacagtttatggataaaacgaaaggaacgttttgggtatcaccccaaaatatatctggaaattcggctaatacttatatttattggcaacaggctcatgctattgatgtggtattgtattcttatgaacgtatcaaagataataatcctatattggctgcgacatataaagaatattttgaaagatggtttcaaaatcatggaaataattatcatcacgacaacaacgatcctacaggcttttcaaacccatatactgatgatatgtgttggattggtctgactttgttacgaatgtcagaagtgttagacgataataagtttgccgatacagccaagaggttgtatgacacttacattattacacgaaaatggacagatgataaaggaactggacttccttggaataatgaaaataattctaatgggcgaagccggaatatatgtaccaatgctcccggtgctttgatggctgccaaattgtataaaaaatacaatgaagataagtatttatcagatgctaaaatacttcataaatttgcctacgacaataattacttaacattgggagatggtagaatagaggaacctcctttaacctatacgcaaggtacgtatggagaagcaagtaggcaattgtatcatattacaaatgaaaaatattatctgacatgtgcagaaaaagtaattagctatgtcacaaccagtgataggtgcttaactaatggcattttgcgtaatgaaggtcagtctatggaccaaagcatctttaaagctgttttgattccttatatagtcaatttggcattggatgaagctgctaatagtacacttaggcagaatctgattcttttcctgcgaaaaaatgcagaaacattgagcgcaaacttgattcgtggaacttatccggaaatgtattgtaactattattggggatccatatttactggaaatattgcttctatgggcgcacaagcaagtggagcttctcttttggaaggtgttctccgactgaatacagcactaggaaataattagtcataagcatcactgtttaaaatgaagcaatgcaaccttaattattcatgcgaatcagttgttgaatgtaagttcttgtttttaagaaattctttgatgctaaaatagctttgatacgctccgtagaacagatagaaggtatattattgaatataagataaataataagcagcttgccattgtttaaatccagctcaatgacaggctgcttaaattataattacttatagtatgctgcagatatgattataaaagatctaatataaatagagaactttaaattaaaaaacagagtagttttgcaaattcacttttaaagattaaatttgcaaataataaaataaaagcagcaatgatagaacgaatattgaaatccaagctaattgaaatggcaaataaatatccgattgtcacattgacaggacctagacaatctggaaaatcaacattattgaggaattcctttcaggactatgagtatgtatctttggaagatcctgatatgagattatttgctacagatgatccgagaggatttctttccacctatccggataaaacaattatcgacgaagttcaaagagttccgtcacttttctcttatattcaaacgcataccgataaagagaataaagaaggtatgtatatgctggctggatctcataacttcttattaatggaaagtgtgaatcaatcattagctggacgtacggcagtactcaagctactaccgttttcgcattatgaaatggaaaaaggagaaatattgccatccagtgtaaatgaagaagtttttaagggagcttatccacgtatttatgataaagctataaatccgaatgattattatcctttctatatacaaacatatgtagagagagatgtgagattattacgtaatattggggatctaagtaaatttattaaatacctcaaattatgtgcaggtcgcatagggcaattattaaatctttcatcattagcaaatgaatgtggaatttctgtcacagcagctactaactggttatctatattagaagcaagttatatctgttatttactgaaacctgattataacaattatgccaaacgattggtaaaaactcctaagttatatttttatgatacagggctagcctgttctttacttgacatacaaaatgcagaacaaataactactcattttttacgtggaggattgtttgaaaatcttgtcatcaatgaatttgtaaaagaatcctataatagaggtgttgaaccgggattatcattttggcgtgatagtactggcaatgaggttgacttattaagaatggttggcgggaaacagtatgcctatgaaatcaaatcaggagcaacttattcaccggatttctttaaaggtatttcaaaatgggctaaactatctaatactccaacggaacaatgtttcgcgatttataatggagataaggatataaaaacatctgtcggtcaagtgaatggatggaatcattttagtctgttttaaactgccactaatatatcatgtctttattccatcttatttgatccctgaaactacatttggggatatattatttctttatcatgcatgaactgttgatattttattctagaattagaatttgttgaaacaatctgggataccccaaatcctagaaataaatcatttttatagactacaaaaacactcgaaaaaccaactaattacaacacagaaacaagacatgttagctatacatatctgataataaactaaataactaaaaaaaacttagtctggacaggacccggaaaaccaactttgcacggatgacttcgccggacattgggctcataatgccaatctttccgtgaaagcgatcatgggagtggccggatacagcgaaatggctcggatgctcggattaaatgatgtagcagacaaatatgcggctatagccaagaaaatggcggtgaaatgggaagaaatggcgaatgagggtgatcattaccgtctggcttttgaccgtaaagatacctggagtcaaaaatataacatggtttgggataagttatggaacctgaatttatttcctaacaatgtaatcggaaaagaaataaactattatttgaccaaacagaatccttatggacttcctctggattcgcgtaaagaatacacaaaatctgactggatcatgtggacagcggctatgtccccggataaggatactttccaacgattctctgatccagtctataaatatatcaatgaaacagtatctcgtgtacctatcagtgactggcaccatacagacagcggacgatgggttggctttagagctcgttcggtgattggaggatactggatgaaggtattaatggataaagttcagaataatcaataatttaaatctagtgtattatgaaatgtaaaactatgaaacatgggagcatagggttacagtgtatgatgttggcattcgtttttgcagtctgttttactggctgcaaagatagcaaagacgagacatcagcaccttatgatccgaatcagccagtagaggtaactgatttcacacccaagtcgggaggtggaaagaagaagatgattatctatggcagtaattttggcacagatccttctcttgtttccgttaaggtaggtggaaaagaagctattgttattagtgctaaaggtactagtatttactgttctacgccggaaagctgtttcgaaggaactattgaagtaaaagtgggtgagcaaactgtgatagcatctgaaaaatatcagtacgaaccgcaaatggtagtaacagacttatgcggtgatgtagatgaattgggtgagggaaatattgtagaaacaggtccgtttgacgattgtggaaagatagattatcctttttggttttctttcgatcctcaacattctaatatcctttatttgtctcaaaataatgggcttttgagggtgctggatctggaacaagaaatgatctataccaagaagctagataatattaaccgcgcaactactattacatggactaatgatgatgatatgatattggcggctccccaaaatggtggtgctaagaatagaaacaatattattttaaagcgtgaaagcagtacagacgggcaggatttcaaagagtccagttgggtagctttggcgcgtggtaatgcttgcaatgggtctatggtacttccacaaacgggagagctttacttcaatcatcgtgcaacaggcaatgtgtacagatataattttgaagaaaacggctataataacaatccggaagttcctggtggagcagggttgaatgaacttttggcatttagtgtacctaatcagacggttgactttagtatggttcctcatccaacaggtaaatatgtttatatcatcatgcatgaatcgcattatatacttcgttccaattacgatgaagaaactaaaaagttggtaactccgtatattgtatgtgggcaatccggccaggcagattataaggatcttgtaggtatcaatgcgcgtatcaataagcctggccaaggtgtctttgtgctcaatgaagagtataaggcagccaacaaagatgattggtatgacttctattttgcagataaagaaaatcattgtattcgaatcttgactccggatggggtggtttctacgtttgccggacgcggttctgcttctgcaagtagctataaatggggtaagcaaaatggagaagtacgtgagagagcacgctttaatcaaccggtggctttggcttacaatgaggcaacaaagactttctatgtaggtgattcgggaaattataagattcggaagattgccaaagaacaggcccctgatgatttaggcggagaagaatccaatgacaatcaaaaccaagaaaatcaataaaaagaagaacacatgagaataaaagaatttattacgatttgtctgttattagtctctgtttccctttttgctcaagagaagacaattgaggtaacaggagtcgtgacggacacgaataaagaaccattggttggtgtcaatgtgacagtgaaggataaacctggtttaggagcgataacggatatcaacggacgttacaaaataaatattgaggaattttctcgtttggtattttcatatattggttttgatacgcaagagatattagtgaaacgtcagagtttggttaatgtatcgatgaaagaatcggatgctagggaaattgatgaagttgtaatcactggtacaggagcacagaagaaattaacagtgactggtgcggtgacgaatgtagatgtagaagtattaaagtcaaatccttcagcaaatctttctaatgcattggctggaaatgtgtcaggtgttcttgccatgcagacttccggacaaccgggtgtaaatacttctgaattctggattcgaggtatttccacttttggagccaatagctctgcattagtgctggttgatggttttgaacgcgatttggatgagatcaatattgaagatatcgaatccttttctgtattgaaagatgcttctacgacggcgatttatggtcctcgtggtgcaaatggtgtagtactgatcaccactaaacatggtaaggaaggcaagatcaagattaatgccaaagtagagacttcttataatgcccgcactattactccggaatttgcggatggttacagttatgccatgttgatgaatgaagcgcgaattactcgtaaccaagagagaatttatcaagaggatgaaatggaaattctgcgattggggcttgatccggatttatatccgaatgttgactggatggatgtgttgttaaaagatggagccatgacctatcgtgccaatctgaatatgagtggtggtggtagtacggcacgttattttgtatcgcttagttatgtgaatgaagagggaatgtacaaaacagacgagtccatgcgtaaggattacaataccaatcctagcagtcagcgttggaattaccgtttgaatacggatattgatgtaacaaagactactcttgtaaaagttggtgtatccggttcgctaaagaagcgtaatgcaccgggacagggctctaatgtctggacttcattaatggggcagaatccggtcagtattcctgttatgtactctaatggttacattcctgcacatggagtagaagataatcgcaaaaatccttgggtacttgctacacagactggatataaagaaatctggaataataagattcagacaaatatttctctggagcaaaagctggacttcattaccaaaggcttacgctttgaaggccgtttcggatttgatacgaataatcagagtgaaataaaccggataagaatgccggagacatggcgcgcccaaagagaacgtgacgatgacgggaacctgattttcaagcaacaaagtgccgagagaccaatggaacagacgagttcttccactggtgagcgccgtgaatttttagaggcctatttgcaatataatcgtgcattcaaagcacatcacgtaggtggtactttaaaatatagccaggatgcttatcggaccacagtagatattggaacagatgtaaaaaatggtattgccaaacgtcacatgggattggcggggcgtgccagttataactggaattatcgctactttgccgattttaattttggttataatggttcggagaattttgctgacgggcatcgtttcggtttttttccagccttttctttagcttggaatatagcagaagagaaatttgttaaaaaacatctgaaatggatgaatatgttcaagttacgttactcttatggtaaggttggtaatgataagatggatgtacgtttcccttatttgtatactatcaaggatgatggaagtggttggacttggagtgattatggttctacggataatgtatatacaggaatgcagtatacacagttggcctctaacaatgtcacctgggaaattgcaaccaagcatgatgcgggtgtagacttatctttattcaatgataagtttacggctactgtagattattttcatgaacagcgtgatggcatctatatggaacgtaaatatctaccaggtattgtgggggtgaatagtaatccaaaagcgaatgtgggaagtgtccggtcgaaaggtttcgacggcaattttgcctacaagcagaagataggaaaagtcaatttgactgttcgtggtaattttacttacagcaaaaatgaaattctggaaaaagatgagatgaacgcagtttatccttatcaaaaagaggctggctacagggttaatcaggcaaagggattaatagctttaggattgtttaaggattacgatgatatacgaaatagtccgcagcagactaattggggaaaggtacaaccgggtgacatcaaatataaagacgtcaatggggatggaatcattaatgctagtgatgaagtggccattggtgcgacaacaaagcctaacttgatatatggttttggtatttctgcacagtggaaaggttttgattttaatgctcacttccagggagcaggcaagtcttcattcttcattaatggttctactgtatatgcctttaaggatagtcagtggggaaatattctgacgaatttagtgaaagatcgctatgtcgatgcggagacagctgccacattgggtattccggctaatgagaatcctaatgcttcgtatcctcggcttagttatggagggaatgataataattatagagcttctacctattggctcagagatggatcttatttacgcttgaaaacattggaagtaggttatacattgccgaaatcaattgtgaacaagatgcggtttaacaagatacgtgtatttttcattggtaccaatatcttgacgtttgctaaatttaaagaatgggatccggaaatgggagtctctaacggtgagaaatatccgcttgctaagacgtttactttgggattaactgtgaatatctaattaaatgcatgaaaaatgagaaagatatataaactgtatattggtattatgttgagtgcgattgccgtcgcttgttcggataaactcgactctgacaaatatttcaaagaccgccggtctttggaggatgtttttactgacaaggaatctacggaagaatggttggcgaatgcctattcctatttaggtggatacaatctggaagtatctaacatgcttaatacaatcactaatttcgccgatgatatttatttcggtgggaatagtcttgatgcgtacaagacattcaagactggtacttatgatgaaggttaccggcattcgtggggggatagttataaaggtattcgtcaagcgtctatcttcattcagaatattgacatgaatacgaaatatacggaagaagagagagccgatctgaaagcgcaagcccgtttcgtgcgtgcgtattattattggttattactacgtaaatacggtcctgtacccttattgccagatgatggacttgactatactgccgattatgatgatttggaaattcagcgtaattcgtatgatgaatgtgtggaatacatcgaatcggagatgtgcctggcagccaaagacctgcctctggcccgggccattaatcaggtggcacgtcccacgcgaggagcagcattggcagctcgtgccagagcattggtatattcggcaagccctatcaataatccacgtccgggagatcctgataaattttcggatttggtagattatgaaggaagatgtctgatgtctcaggaatataatgaatacaaatgggctagagctgcagctgcggcaagagatgtgatggaacttcccggagaaaataacgggcgtcgttatgaactttaccataagaaagcaactaatattgctgaacccggatatcctgctaccattgctccttatcaggataaggacttttcaacaaagacatggaatgaaggtggatatagtgatatagacccttatgagtcttatcgtgctgtttttaatggttcattagcgatgtaccaaaatccggagttgattttcagccgtgggcgtaatcagggagccaatagtattgctgaaatggtgaaacttcaaatgccgaaaactttgggtggaggaagtaatgcgtatggcatgacacagaagatgtgtgacgcttattatatggcaaatggagacgaatttagcagagaacattttaaagaagagtacccttacggcacacgttttgtcactaaagaggaggttgaggcaggtacataccctcaactaaaagaaggggtgtataaggaatatgccaaccgagaaccacgtttttatgcttcggtttcttataatggctgtgtgtgggctttactgaaaaatgcagagacaacggactataagaatgacgttgagaaacaagtcaactattattacggtatcaatacggacggtttctccggtactggtgtttatttacgatctggcatcggtatcatgaagtatgtacacccggatgatacgaatcgtaaggaaataaaagcaaaagcagaacctgccattcgttttgccgaaattttattgatctatgccgaagccttgaatgagttggaggatggatcttcatatgacatagcatcatgggatggttctaccagttattccgtcaaacgtgatattgatgaaatgaaaaaaggtatcagacagatacgtcgccgtgcgggtgtacccgattataccatgtcggagtaccaagatcgggatgtattccgcaagaagctgaaacgtgaacgtcaaattgaactcatggccgaagggcagcgttattttgatttacgtagatggaaagatgcagaagtggaagagtccaagaaaaactacggatgtaatttctatatgtcggatacggaggagcagagagaacaattctatactccgattgaaattgcagacttacctactgccttctcgcgtaagctctatttctggcctatcagccacgatgagctgaaacgtaataaacggttgacgcagaacccgggatggacatacaatgattaatctcctaataagaatatgatatgaagaatatatatatttatttaagtttattggctgtcatcgtcttgggaaccgcttgtaataatgagtgggaagatgagcagtatgaacaatacgtatctttcaaagcacctatcgcttcaggaggcgatggtgttactaccatctacgtcagatataaggataatggaaaagtgacttatcagctgcctgtcattatcagtggctctacagtgaatggacaagaccgagatatacatatagcagtggataaggacacattgaaaacgttgaatatcgagcgctttagtctttatcgtccggaattgtggtatacggaaatggaggaagataaatatgaatttcccgaaacggtacatattcctgccggttcgtgcgtagaacaattaaatattgattttaatctacaaggcattgatatgttggagaaatgggttttaccgttaactattgttgatgatggagcctatgattatcaaagtcatccacgtaagaactatgcaaaagctttgttgaaggtagtaccttttaatgattattccggttcgtacacggcttcttccatgaaagtgtacacttatataaatggtaagcctgatacgaatgcaagaacgacgaacaagcgtacaggatatgtgatagataacaattccgtattcttttatgccggtctgattaatgaggatatggataaagacatacgtaagaagtacaaaatcaatgtacacttcagagaagatggaacattggatatgaagccggacgatcccaataatgaaatggaatttgaattaataggaacacctatctatagtagtacatcgattatggatgctacacgcccttatttggaacgtcgttatgttcaaatcatgtttgaatatgatttccaggattttacctatggtggaagtgatacggaagttatccctatcaaatatagagtggaaggaagcatgacgctacaacggaatatcaatacacagattccggacgaagaccagcaaatagaatggtaatcttataaatgagtggagatagggaagatataggaataatatcttccctattttgtttatatatgggtttagattagctgttcctcatctttgtttacctgtttttttcctttattgatttgtatttttccctttctcttaaaaaacctccctacttttgttctgtaagtcagtcacacgaaaccgacaaaaagtacagttaattaaatcagaataattatgaacatcaaaaaacatttgccttggttgggagctttattacccgtagccagtatgcaggcagagacaaaacctaatgtagtcgtcatttatatagatgacatgggaatcggggatatcggttgttatgggggtaagtttgttcctactccgaatattgataagatagcgcaggacggattgttattcaatcagtattactcgtccgcaccagtcagctcaccttcacgttgcggattgacaacaggcaaatttcccatagaagtaggaattaatacctttttaaataataaagccagcaacaaaaagtgtgaacaacgtaactttttgagtgacaagaatccttccatggcacgcgcttttcaaaatgcaggttatgctaccggacatataggtaaatggcatatgggaggtggacgcgacgtgcacaatgcaccttctattaagaattatggttttgacgaatatatatcaacgtatgaaagtccggatccggaaccggcaattactgctacgaactggatatggtcggctaaagacagtgtaaaacgctggagacgtaccgaatactttgtagataaaagtattgagtttgtaaaaaagcataaaggcgaacctttcttcctaaacctatggccggatgatatgcataccccttgggtaccggaattcaaacaaaaggaaagaaaaagctgggaaacacaagaagcatttgctcctgtacttgcagaaatggacaaacaactcggacgtttcatcaaaaccctggatgagttgggagtcggagaaaatacaatcattattttcactagcgacaatggtcctgcacccagctttaaatctgtacgttccgcttatttgagaggtactaaaaatagtctttatgaagggggaatccgtatgccgttcatcgttagatatccaaagaaaattaaagccggacaggtaaataacgagtctgtattatgcgcagtagatttatatccgactttgtgttctatagccggaattaaaacagagaaaggttaccagggggacggacaaaattatgataaagttcttctgggtaaatcgaaagctaaacgtaaaacagacctgatgtgggatttcggtagaaaccaattctttaagaaaccgggaaatgcaaacgataggagtcctcatctggctatacgcagtggcaactggaagctattgataaatggcgacggaagcgatgcacagctgtacgatattgcaaaagacaaatttgagaaaaatgatgtagcgcagtcgcatccggaaatcgtagctaaattgggcgaaaaagtatgtaaatggtttgagaaaaacaaagataaaggaaaagagtaatacagtgaaaaacaaattataaaccaatattaaacttatgaattctaaattattactattaccgaccgccttgatggttgctggtcattctgcagcagaggcgaaggggaaaaagtcggacaaacgtcctaatatcctggtcattcttgcagatgaccttggttattccgatttgggatgctatggtagcgagattcatactcctaatttggacaaactggcacaaaaaggagtacgattcaatcatttctataatgcaagccgtagttgcccgactcgtgcttccctattgacaggactttaccaacatcaggccggaatcggacgaatgacctttgatgctcacttaccaggctatcgtggaacactttctcgcaatgccgttactattgccgaggtattgaagggagcaggatataccaccagtatggttggaaaatggcatgttgccgagactcctctacgtaaggaccaacgcgaatggctggcacatcgcgtcttccatgatacattctctgatttatgtcattatccggttaatcgtggctttgattctcactatggagttatttatggagtggtggattactttgatccgttcagtttagtagaaggtgaagtgcctataaaggaagtacctaaaggatattatataacccaagccctttcagaacgtgccgtacaggaggtagaagaatatgcaaaggatgataaaccattctttatgtacttggcttatacagcaccgcattggccgctgcatgcacttcctgaagatattgagaaatataaggatacttataaagtaggttgggaagctatccgtaatgcccgttatgaacgtcaaaagcagttgggtgttttcccgggaatggataactttttgtccgaacgtcagtttcatgacaaatgggaagataatccacatgcagaatgggatgcccgtgcgatggccgttcacgctgcaatgatcgaccgtgtagatcagggtatcggacaaattatcgaggctttgaaaaagaccggacagcttgataatacattgattcttttcttgtctgataatggttgcagtaacgaagactgccagaacatgtctggtggagagaacgaccgtccggatatgactcgtgatggaaagaaaatcatttacccgcgtaataaacaggtattgcctggaccacagactacatacgcttcattgggagcccgttggtctaatgtagcgaatactccattccgcttttggaaagctaaatcttatgaaggaggtatctgtactccgatgattgctcattggccgaaaggaattaaaaagaacgtgggtggcatgacatctgaaatagggcatgtaatggacatcatggctacttgtgtcgatttagcggatgctgaatatccaactacctataaaggacatgatattcttccaatggaaggaaagagcttacttcctatcttcaagaccggacatcgcaagggacacgactatctgggctttgaacacttcaacgaacgtgcttttctttccaatgatggctggaaactggttcgcccgaaaaataactctcaatgggaattgtacaatttgaatgaagaccggagcgagcaacatgatctggctgctaaatatccggagaaggtggcagaaatgtcaaaagcatacgaagcatgggctaagcgttgcatggtagaaccttacccgggacagaaaaagaaataactgtcattccatttaaaacggaatgaatagaaacattgaaagaataatggggatgaaggattccggatcaggaataacttcatccccattaataatatctgctatgaggttatctacaacaagaactattgctccgcttgcccgattgtagaatacttcatacttcctatttgtccatccttactcatcgtttccgcctgaataatcaccggagtggaatattggttattataacattcaatcacagcttttccattttcatctgtccgtacagacggattccagtagagcgtccgtcttttgtccactttatccatatacaattccttggtcgggtaggcaggtgaataatattccagtgcatgagtatatccctgaatgactgtttgccgggtaccaagtacggcagtctgacttttgttcaatacatcgcgtctgggtaggggaatcaggtagaaaacactgtatttgtccagtttgctgatatccactcccgtactatccgtaacttcggacattttggtgttttgaatgatgtcgtcatcaatgcctccggttcctttgctgatgatgatagaagccagtccatccacttcggtcaacatcatttgagtttctgtctcggataaaatgtggttatccatgatatagcagattggtttctgccgataagtaagcttgtcattgctacgatcccaatcgaattgcggacttaacttttccattaattccggaatagttgtgacaatcttcccattgtcacgtaataaatctacagaacggcgtacgtcgtaataagcgtcaatgcttttctcattgattttagtagccatattacttccttgccggcgtttgcttttgatttccacttcatccaatacataaagtccttctactttccggatagaatccatgtatagagaatcaaaattctcggctttttgtagccagtgggtcaagtccttccatttaggatgaagctccttgtagccgtaggctcggggagcaggtgagaaattacggtcgatcaggatggatgcatccttgttgcgttctttaccgactttccgggtttggatcaccgcttccgtggttccttcaaagtcttctacaggaatggtgaaacgaccgttttcatcggtcacggttcctccagtgataaattggtcatctttcttcactatcacactaagcgctatatctttcagcttattcttgaggatcgttgatttaacctgcccgttcaacactaattgagcttccggtaactgcaacggagtgaaaggagcagtagaaatggcttggctcatgtcatatttacgccatccatgcaccattaataatatatccagttccgtttgcttccggggagacggtgatgcaaaataataaccgggctgatggatatatccttttaaatcagatgttaacagcaaatcagtgaagatgttattgtcatactccagataatctgaccggacggcatcccggatgctgactgatacatctcccgataccggttctcccttggcattctttacctgtaactcacaacgaataggagcgtagggagtatacacctctttcaggccctctgcggatagttgtagaggagcacgtggattggaaaagacaaaacgctcgcataacgtattaccagctcggttgatgaggctgacttgcagtacacctgccggtagtttgcgggtaggcagaatgaactcttgtggagcgtccgcccggcaactaatcaattgatgaacatacggccgtccctgatgactgataaatatagctaatgtatcttgaggagtagcggcattgcaggatactttcaccaaaagggcaccggcattgttgacagtactcaacacatacccgttaggcaacgcttgtggaagggtaaattcatacttctttccttgaaaatcgactttggcaacagccggttgtgcagaaggcgtatattcaaaatgccccattccatcgtgcaaagtctcgaaagaagtgatttctgctccttctttggtatagagcgttcccgacaattctatattcccttcatctttactctccgccttgaaagccacttgcgaagtcactccttccactaattgccctccttcgggaaaaaaacgtacactcaacttctcctttgtttccgacggacggttctccattgacggactaagttcgtaagttgtgatactacgttccagcttatcactattcgccagttgataaatcgggaaagtacgtgagaaatactgcggttcgttgaaagcaagcatccagcgggtataggcacgtacctcataatagccggataacatggaacggggaagaacgaattgtccgttcccttctccctgcgtcagtttaatgatttgtttatctgttatatgtcctgtctgatccaccagttccacatacagggggcggctgatcggactgaaagtctgcttttcggcgagagtgacataagccttgaaccagatcgtatctccaacataataactcgtgttgtcgaaatgcaaataagctttctctcgtggaaagttgttggcaaatgtctgtgcttggttcatgtattgttggaatataactttggcaggaggaatctctccccatgctattgctagcgataagcaaaaagaaagaagaaaaagaattcgtttgtttttcatttcaataggtttttaactaaaatgcaaagttagaatatattgacctaaaaatagaaaactaattgttcaataaaggaaaaaaactattcagagtagaaataaaagttcatggacgcattgtatatcttttggatagcatatatacctgattttgttctttattgattagcatttttccttccttttgcataaacttccctatttttgttttccagataattgataatactatggtaaagaagaatttcttaatgactgcccccttactgatggcatcgttttgttcggcacaggaaaagccgaacgtcgtactgattatggtagatgatatgggttattccgatatcggctgctacggtggagaaatactgacccctaatattgatgcattggcatccaaaggagtacgtttcacgcaattctacaatacttcacgttcatgtcccgcccgggctagtttaatgacaggactatatcaacatcaggcaggtatcggtcagatgtccgaagacccgtttaaaaatcctggccagaagagtccgaatgattggggtgtacccggatacaaaggattcctcaaccgcaattgtgttacaatagccgaagttctgaaagaaggcggctaccatacctatatggcaggtaaatggcatttgggaatgcatggagaagaaaagtggcccttacaacggggatttgaacgcttctacggaattttggcaggagcttgcagttatctccgtccatcgggaggacgcggcttaacccttgacaacacaaaacttccggagccggaagcaccctattatacaacagatgcatttaccgattacgcaatccgctttgttgacgaacagaaagatgataaacctttcttcctatatctggcatttaacgctcctcactggccgttgcaggcaaaagaagaagatattcaaaaattcacgaagatctatcgtgagaaaggatgggatgaaattcgtgaagcaagacggaagcggatggctaagttgggaattatcgactcgaatacagagtttgccgaatgggaaaatcggaaatgggacgagctgacagagaaggaaaaagatgaagtagcctaccggatggccgtttatgcagcgcaggtgcattgtgtagattataatgtaggaaaactgctggactacctgaagaagaatcataaactggataacacgcttgttatgttcttgtccgacaacggtgcttgtgccgagccatacgctgaattgggaggcgggaaagtgtctgaaatcaacaatccggcttgtagcgtgttcccttcttacggaagagcatgggcacaggtttccaatactccgttccgtaaatacaaatgccgttcttatgaaggaggtatttctacccctctcatcgtgtcgtggaaaagcaatctgaagaataagaaaggtgaatggtgccgtgttcccggttatctgccggacattatgccgaccatcctggaagcaacaggagccgcctatccggaaacttatcacggcggaaacaaaatatatccattggtaggcagtagcctttttcctgctattcaaaagaaagcagactctatccatgaatatatgtattgggaacatcagaacaatagagcgatccgctggggaaactggaaagcaatccgcgacgaaaaaggaaaagagtgggaattgtacgatgtggttaaagaccgtaccgaacgtaacaatctggcagaacagcaccctgaagtgcttaccaagttagttgccgaatgggagaaatgggcgaatgcaaactttgtattaccgaaacatctgaagaaataaataaaggaggaacacaaaatgaataaattactagtaagtgcatccgtagccttgggagctaccagcctgtctttcgcccagcaaacggaaaaaccgaacttcctattgttcatagccgacgattgttctcattatgatttgggctgttatggcagtgttgattcgaaaactccgaatatcgaccactttgccacacagggagtacgcttcacacaagcctatcaggccgttccgatgtcgtcgcctacccggcacaatctatataccggtttgtggcctgtacgcagcggagcttaccccaatcatacttgtgccaatgaaggaacattgagcgttgtacatcatctgcaaccgttgggttataaagtcgcgttgatcgggaaatcgcatattgccccgaaatcagtatttcctttcgacctttatgtacctcctttgaaaggtggggacttgaattttgaagcaattcagaaatttatttccgattgcaaggcgaaaggcgaacctttctgtctgtttgtagcctccaatcaaccgcatactccctggaataaaggcgatgcctctcaatttaatgcggacaaactgacactgcctcctatgtatgtagatattccccagactcgcgagttgtttacccattatctggcagagatcaattatatggatcaggaatttggtaatgtcctttctatcctggatcaggaaaaaatgacggataaatctgttgtcgtatatttgagcgaacaaggcaacagcctgccttttgccaaatggacttgttatgatgcgggggtacactctgcctgtatcgttcgttggccgggagtggttaagccgggaagcgtaagtgacgcgttggtagaatacgtagatattgtccctacttttgtcgacataataggaggaaagccgcaggcaaaagtagatggcgaaagctttaaaccggtattgacaggcaagaagaaaacacacaagaaatattctttctcccttcagaccacgagaggcatcaatgcaggatcgccttattatggcatccgttcggtatacgacggccgatacagatatattgtcaatctcaccccggaagctactttccagaatgttgaaacaaaatctcctttgtttaaagagtggaaaagtctggcgaaaacggatagtcatgcaaaagcgatgacgactaaataccagcatcgtccggctatcgaattgtatgatgtgaagaacgacccgtattgtatgaaaaatctggcggaggatgcgaaacaagcttctaccatcagccgcttggataaagagttgaaacgctggatgaaggattgtggagacgaaggacaacctaccgagatgcgtgccttcgaacacatgccgggaaagagaaaataagccgtcacacatcaaaacgaataaaacacagaatgtaatttataaatcgtatatcatgaaaaaagaattttttggtttgctttgtggatgtactctgcttccggcatttcttcatgcgcagacagagcgtcctaatattgtgattgtattggccgacgatttgggttggggagatgtagggtttcatggtagtgaaatcaagactccctgtctggatgctttggtgggcgaaggagtggaactcgaacgcttttacacttctcccatcagtacgcctacccgtgcgggactgatgacgggacgttacccgaaccggtttggtgtccgttcggctgttattccgccctggcgtgaggacggactggatgagaatgaagaaacggtggccgatatgctggcacgtaacggatataagaacagagccattattggtaagtggcatctgggacataccaagaaagtgcattatccgatgaataggggattttcgcacttctatggtcatctgaacggtgcgatagattatttcgacctgacgcgtgaaggtgaactggactggcacaacgactgggaaacctgccacgacaaaggatattctaccgaattgataaccaaagaagccatccgctgtatcgatgcatacgagaaagaaggtccgtttatgttgtatgtggcctataatgcacctcatacacctttgcaggcacaggaaaaagatataaaactctatacagacaatttcgacagcctgacaccgaaagaacagaaaaaagcgacttacagtgcaatggtttcttgtatggacaggggaatcggtgctattgtagatgccttgaagaagaaaggaattatggacaacactttctttatcttctttagtgataacggcactgccggtgttccgggatcctcatcaggacctttgcgtggacataaatttgacgagtgggatggaggcgtacatgcacctgctgttctttattggaagaaggcagagaaacaatataagaacttgagttcacaggtgacaggttttgttgatcttgttcccacattgaaagatttggtaggagatcacagccgtccgaaacgtgaatatgacggtatcagcatcctccctgtattaaacggtaaaaaggcctgtatcgaccgcgatttttatctgggacacggagcagtagtcaataaagactataaactgataagaaaaggtatgaaaccgggactggatttgaaacaggactttctggttgattataaaacggatccttacgaaaagaaaaatgccagcgcaggaaacgagaaaattgtgaaagctttgtatgaggttgccctgaaatatgacacgatcactccttgtgtaccggaagtaccttacggtaaaggtcgtgacggattcaaagctcctaaagaatggaaagtagtacgttgaatctgttaaccctatgaattgaaaataatacaagatggaaaaatcaatgattagtttatgcctcttaggcggattggcgataggaaacgggtttgcccaaactccttcaaagcctaatatattattaatcatagccgatgactgctcctattacgatataggctgtttcggagcggtcaacaacaagactccccatatagatgcattggctcgacaggggataaaattcaacagtgcgtataattctgtttcgatgagtacgcctacccggcattgtgtttatacaggtatgtatccgatgcatcatggcggttacgccaaccatagctcggtcaatgccgatgtaaaatctctccctacttatctaggaaatctgggttatcgggttggattggccgggaagtggcatatcaaacctttggctaacttcccgttcgaagatgtaccgggattccccaaaggatgtacaagcccaaacactgactatcataccaaaggtatcgagaagtttatggagcgtgatgcttcccaacctttctgccttgtcttggcttctattaattcgcatgctccctggacaggtggtgacgcttccgtctttgaccggaagaaacttcagttgccgccacagtttatcgacacggaagtgacgcgtgaatactatgccagatatttggcggaagtcggcttgctcgatcagcaggtgggtgacgctatgcagattctgaaagaaaagaatctgctgcagaacactcttgtcattttcatatccgagcaaggtacgcaatttgctggagccaaatggaccaattggagtgcaggtgtcaagtcggcgatggtggcttcctggccgggtgtcattaaacccggtatggagacttccgctattgtgcaatatgaagaccttcttcctacatttatcgatgttgcaggcggaaaggtgcctgacgtaatagatggaaagagtctggtagatgtatttcaagggaaaacaaagacacaccataagtatgcttatcatgttcacaacaatgttccggaaggtccggcatatccaatccgttctatttcagacggacgctatcgtctaatctggaacttgactccggaggaaacatacgtagaaaagcatattgaaaaggcagaatggtatctctcgtggaaagcacaggacacggatcaggcacataaaatcatgaaccgctataagaatcgtcccgagttcgaactatatgatatcaagaaagatccgtttgaaatgaataatctggcggatatgaagaaatatagtaagaagaaggcagaactgacgatggaactgcaaaaatggatgaaacagcaaaatgataccggagctgataaagaccggccgcgtgctcctaagaataagcagaagaaagcagccaatgtataatattcgtaatgctaccgcttgttgctctctgcaagagatttatcttttttatttctcatttctcatagaatctaggcaataggtttataatcaattgtatatagtatgagaaatgctttctatgcaggcatttctcatactttttacagatattttaacgaaaaaacagctatttctcattcgtttttcaatgatttctcatacatctgccctgcatttctcatacgtttctcatgatgattgcatagacgatggttgctgatcttatttacattgaaaacagatgaaaggtacttatcattcaaacaaccctatgccagcatgtttttcattcgttatcgtccagttattgatagagcatctccatcgttccactagagtgacgagggctgttcactagggtgcatagattcgttcactggagtgaacagggcagacgcattatattttttactatattctcctttgttatttctttgctatactactgattattaatacactatcatttgtttatatcgattgtttttcttatctttataagatatattaaaacataaactaacatgaaaattggcataattgacctttgtaaacaaatagaagatcctaggatgaaccgcaaaaaagtacataaaatggaaaccattatctatatatccattgctgctgtaatctgtggcgcccaatcctggaatgagattgaggaatttggcaatgcgaaaattgcttttttcaaaagtcgcatacctgacctggagttcatccccagtcatgatacttttaatagattcttcagtataataaagcccgagtattttgagttgatctttcgtaactgggtaaaacaagtctgtcaggaggtgaaaggcgttgtagctatagatggcaagctcatgcgtggtccaagccaatgtgatggagagcatactacgggaaaagaaggattcaaattatggatggtttccgcctggtctgccgctaatggaatttctttaggtcaggtaaaagtagatgataaaagcaatgagattacagctattccattgttaattaactctttggaactaagtggttgtattgttacaattgacgcgatgggatgccagaaagatataacccagaccattattgagcatgatgcaaattatattatagctataaaggagaataagaaaaaaaattatcaactagctaaacaaatcattgacgattatcaggataaagatgaaataatcaatagagtcaccaggcatgtgtcggaaaacaccggacatggaaggattgagacaagaacatgtactgtagtcagttatggatctattatggagaaaatgtttaagaagaaacttgtggggttgaagtctattgtagggataaagtcggagagaacaatagtagcaacaggagaatatactcaagaggtcagatactatgtaacttcacttgataataccaaaccggaggagattgcatctgccatcaggcagcattggtctattgagaataatcttcattggcaactggatgttacctttcgagaagactacagtaaaaaggtgaaaaatgcagccagaaacttttcggtggcaacaaagatggcacttaccatactaaagaatgaaaaaacaacaaaaggaagcatgaatctgaaaagactaaaagccggatgggatgaaaaatatttgtcacaacttttacaggaaaataatttttaatgcgtctgccctgctggagtgaaaggacttggctactggagtggaacgattgagatgtcagtcagataatccgggcatgtcggttggaaaacatgaagagatgggttatatcatacacaaactatagctttaatacattcaatatatgaataaactaatcacaatctcctctgtacttcttacagctgctgctgtaaaagcgcaaacacctaatatcgtatttatattggcggatgatttgggttatggagacatctcggcctttaatcccgaatctaaaatccatactcctaacattgacaaactggccgagcacgggattgcctttacggatgcccatgcttcttccgctttatccactccttccagatattctcttctgaccggaaggtatccgtggcgaaccaagctgaaacgaggtggtcttgatggcgattcgcctgcaatgattgatcctgaacgtcgtaccatcgcgcaaatgttttctgcaaatggctataataccgcttgtatcggtaaatggcgaaacgggctatgaggcaatatgtagagaatgtccgttctactcctgatgaaaaagtatcgaatgatacgaagaatagttggaatcaggtaaagaacttcatgcaggaagaataagcatttctgaaaaaataaaaaaacagcaccctgaatagacgtcagaggtgctgttttagtttcaacaaggaaaagagtattattctatttattatttattcagagagttacagatctgttggttgatttctctgactttagcttcattcatcttgataactttacggtcataagtcatcagaccgttgatttcaccttctacgtctgttgtctgggtatatacggcagcagagaatcctttctggatcaattccaacagatgtttgccatatttaatgtattcgttcgttacttcgtccgatgtattgaacttcacataaccccagttttttttgtcattcacccaagtgtttccttctactaccaagccgatacctccatattcacccaatacggtagcacgtctcggatcgtaaaggaacatgttcgggcccggatagtggtgaaggtcgagaatatcgccacaagtatagtgattaccaccactggcaggattcaccagacggctaggatcgtattctttcgtccatgctacgatttccggagtcttgaattgtccccatgcttcattgaaaggaacccatacggcgatactcggataagaatacagacagtcgatgatttctttccactctttgcggtagttagcttcggaagcggcagaacgaatcacttctctgccgttaaagtagttgcgtgcctgccactgtgggctaggaccaccgttcggcatatcctgccatacgatcaatcctaattggtcgcaatgagtgtaccagcgtgcaggttctactttgacgtgcttacgtaccatgttgtagccgaagtctttcgtcttcttcaagtcataaaccaatgcttcgtctgtcggtgcggtatataaaccgtcaggccaccatccctggtcgagcggaccgaactggaaatagtctttgttgttcaattgcaggcgagtgatgccattctgacccttgcggatagaaaatttgcgcatagccgtataactctttacctggtctattgcttttccgtctttatacagagtcacttccatattgtagaggaaaggagagtccggagaccacagtttagcattagcaggcattgccagttcaacaggtactccgttcaacgctgcgcctttggctacaaggtttttgccatcgaatacttttacttccactttgtctgcggaggtcgtattggcagcaacttctaccttaacagaattgttgtcaatatcgggagtcgttttcagattagtgatgtattgtgttgctaccggttccaaccacactgtttgccagatacctgtaaccggagtgtaccaaatgccatgagggtttgctatttgctttcctctgggttgttcgccacgatctgaagggtcccatacttttactaccaggtcattatttcctttattaagtacagaagtaatatcgaaatagaaaggagtaaatccgcctgtgtgttcgcctacttttacatcattcacccaaacttctgctttccagtctactgctccgaaatgcaacaggatttgtttaccacgccaggcagaaggaacgtcgaaagtacgttggtaccacagttcttctttctcgtttatcattttgcctacgcctgataaagacgattctacggcaaaaggaacaagaatatcaccttggtaagtggcaggtgcaggagtacctttgggagtgattgcatatttccaaagcccgttcaggtttttccagtcgttgcgctccatgataggacgcggatattccggcaatacgtttttagggtcaagctgttctccccacgatgtcttgattttgtcaccggcaggtttccattgagcaaaagtcgaactgcataaagccaatgcaagcagcattgttagaaaattctttttcatgttcatggtataaaaatatagttagttattagatataaattccattaaaaggatattgcaaagaaaggggaattaaaagagaataaaggaaatttgccgttcaaaaaacagcaaattctcttctttttgatcaaataatgagttttttcgctaataaaacggactattgactaatttttattctttattggaccgttagtttcatgcgatattggaaattatgtacatctttgtaatgccaatatcgggtaacgaaaatataataacttcaaaagttttctttatgtgaaattttatatatttttgcaataacgattgtggtagcttatctatatttatctgatatttatgcaggaacataaacaaaaatatatttggggcttttggataatatcctttgttattacttctatattttacatgggttgttcaggtgaagaaccattcggaaataaagaggaaatagctgggcaaatgtcgcttgctctacaacagaaggatatgtattgccaaaagaaactggatcgtatcgattctattcgaaacttcttgaatgtgaatgaaaaaaggaggacggacgaagaaaagtttcagatcaatgcaaacttgtataatgaatttaaactttattctttcgattctgcctttcattatgccacacagttgtgcaagatagccagtagcatagatagtgctgcatatatggtaaatgctaaaaccaagctgggatatattttagcacgcggaggtttctttaaagaggctatagattcactttcttccatccggattgagaaagagacattacctgctcaagtgttggcggactattatattagctttgggcgtgtttatcatgatttggcggattatgcaaaagacgatgtgttttcatccaagtataaccaaataggaaatgaactcttgacggaaagtctgtcttatctttctgattcgtcaacaatctattatgtgagaggaaaaatagcccttaaagacgataagttagctgagtccaaacaactttataggcaggctttagaattatgcgatatgactgacacggaaacactttccgtactcctgtcgacattggcatttatcgatcgtaggttggaactgaacgatgaggctatctattactatgtgaaggcggctgtgaatgatatccgcagtgccaccaaagagtcggtctctatgagaggattggcaacgatgctgtattatcataaaaatgatgtaaaccgtgcatctgaatatataaatgaggcatttgaagatgcaactttttatggaacccgtcacaggattaatgtcatcggaactttattacctgtatttgtcggagagaaactcgatatagagcaggttaagcggcagacttttcaggatagtcttatcttgacttctatttttgcgattatattaatagtggccatcatttatattctagtacagatgaagcacttgcgtcgttcccgtcaattgttggaaaagctgaacttgaaattgtcggaagcaaaccgtattaagaattcgtatataggacactatctggatgctacttttaaattagttaatcagcttgataattttgtattggtagggcagcaaaagttggagaataagcagtatgattctctttcttcgatgattcataatttaaattcggattttaacaggaaaagcgcttttgctgattttgataggacattcttgtccttatttccaacatttgtcgaaaatttcaattcattgcttcaaccgaatgataaatttgcattggagaataaagatgcgttaaattctaccttacgtatttttgccttgatccggttgggaattacagagtctgaacaaatatcagaaatcctgggatattccgtgaacaccgtttataattatagagttcgcactcgaaataaagctgtggatcctgctaattttgaaaaaaatatcagaaaaataggtctgtagttgttatataagtacgtataaacccctatattttcacctgtttttgattttgtaatcatttgattattagttgattagttttctaatttccctatatttttgttatatggcggatatatcccctctttttccggttggtaattcttaattttgcctatgcttcgattaacaaagagtataaacgacttaaatcaaaaagaaccgtgaaaagtatgaagaactacaaccgattatttttattgaatctaattgctttattttttctttccacttcgtctctggcaataaattccatttcttctttaaaattggagaaaggtaattttcggattttgttatccgggcatgaagtagaacctgtaaagctggcggcagaaaccttatctaaagactttgagaaggtaatgcattacaaacctgtaatctcacaaacgattgatgaggcaaatagtattgatattgttatcattaacgaagagacgggcggttctttgcttcagcctcgattcattcgtcctttggatggtttcgaatctcatagggtatattgtagtcccgatgagaagcgtatttatcttcatggaaaagatatgcgtggtgctatatatgctatttatacttttagtgaattatttcttgaagtgcccccgttgtggtatttttcttcttgggaaccgcagtataagaaacaggtggagatacaatcggactttgactattttcagaagtcaccacaagtcaggtatcgtgcttggttccctaatgataccgatttgttcagtccctggagacgcttgtcgaaagagaacaacgaattgtggctggagactatgttgcggttgaagcttaatactgtcgaattggaagctacggttacatatccggattataaactgaatggtcaggctgctttattacgtaaatacggactggtacttacttctcatcatcacgtagcctgcaacaataatctgaaaaactgggaaggatactggcgacgagtgcgcggcatgaaagcaccggagttacttttatcgaatgaaaaagctcttgttgagttttggcaatatagcatagaaacggtgtgtcgtgataaacaggaaaatctgtggcagattgcttttcgtggtgtaaacgaccagcctttttgggctgcttttgccgatgctccggcgggtgataaggaacgtgcagaggtgattaaccgtatgatccgcatacaattggctatgataaaaaaagcaacaggagagaatgatccttttgtacgaatgactttctacgatgaactttctgacttgttggctaaaggctatttacaacctccgacaggtaagaatatgctttggacttttgttgccggacggagagatcactatccttacgatgatttggttacattcgatacgacaaagcaagtgaaactggggtattatatgaatctccaatttacttcgaccggtgctcatctggctcctgcagaaggtccatggaagatggaagcgaactatcgttatgtgaatacacgtggtccgctgactttctcggtggttaatgctggcaacttaagagaatttgtcatggaaatgtcggccaacgctcgtatgatgtgggatatgaaggcgtataatacaaattctttcctgattgatttctgtacccaatattttggaaaggagcatgctactgaagctgccaagctttatcatgattattactatgcctattggcaacagaaaccgtcagagtttccgggattggaacgtcagtttatctttcaggatttacgctactctcgtgtttttgaacagatcggaaaacgctttgatgacttttctccgaatcctttgtatgagatcggatttgaacgggtgcccggtcgttcgttccgcattgacggaaataatcaggttgattcattgattgcgggaatgaaaaagacagctgtgcgtttcgaggaggtttcacgacattgtgaagattttctcaaatctttgccaaaacaaaatcaacggttcttcagagataacttggctgctccttgccattatatggcagcattgagtcattcattatatcattttgtatctgcttataaagaaaaggatcgcagtaaacggactgaacatctggaagtcgctatccaagaattggaagaggcacgtgatgccctgtatgaaacgcaggaaggagtattttccacttggtatataggtgattccatgaatggtaaatttaatattccacaacaactcaaattgttaaataaactgcacaaagaattttagtaacaatttatattaattacctaattgaatctaatttatgagaaatttagactttagcacgaaggtatttcgtctgctgatgctggttctcctactcttttcggtacagataagccgtgctgatgaagggtggccgagaactctcaaagggcgaattgttgacgcgaaaagtggagaaacccttattggggtaaatatccagatcttgggaactaccacaggtacaatttcagattttgacggaggatttcaattggtggtcaaagccaattccgttatccagttttcgtatgtgggatataaacccattgaaatcaaagctgaagaagcggtaaagaaaactgttttccaaatggaagaggatgctggtgtacttgaagaagtggtggtagtggggtatggtacccaaaaaaaggtgactagcgtaggctctatcacacaagctgatggaaataagttattaagaggaggtagtgtcaattcagtaaccgaagcattacaagggaaattgaacggtgtagtagctattaattccggtggtatgccgggaggaaatgatgtttctatgtatatccgtggtaagagtacatggggaaatacagatccgcttgtattgctcgatggtattcagagtgatattaaggatgtggatatgaatgagatcgaatctatctctgtattgaaagatgcttcggcaactgctgtatatggtgtacggggaggtaatggtgtcattttgattactactaagcgtggtacaaataaagcacctactatcagtttttcggcaaattatacgtataagtcaccgactaccagtatggaacttgctgattatgttacgtccatgcgggcttataaccaagctatggctaatgatgggagctggaacaagttgattcccaggtctacacttgatgcatgggaacgtgcttatgccgaaggaaattatggtgcgtacaatgatgtattcccttatgtaaactggtgggatgagttggtcggggcaggttttacccagaattataatgttaatattcgtggtggtacggattatatgaagtattttgcttcggttggttaccagggtgacggtgatatttataagttaaagaaaaatgactcatttgatccccgacatagttataaacgttacaactggcggtcgaattttgatttcaatataacgaaatccacaaaactttctattaatgtggctggtaagatggcttatcgtaataaagcacttgatgacagtaatccgttctatgctatattgacgagtccgacgagtgtttatcctgtgaaatattctgatggggaatggggagatgatacttacaccaatccggtagctaatatgaatatggaaggtgctaatctgcgtaaaacatttcaagggtggtatgatgcttctcttgaacagaagcttaattttattactaaagggttgaaagtaaatgccaaggtttcttattcttcatcatctactacttctacagccacttatctgggtacggaagcagcaagtcaggcgtttaaatatattattcgttattcacgtacatacgactatgctaacccgattattggtgaagatggacagttaacttatccgatgttggaaagcaagcgtcttccttatgaaacatctgtgtctaatccggcttttgttaaatattacgatcagttggatgcttatagccgtcggttttattacgaattctctattgcttacaaccgttcgttcggggatcataatgtaagtgcacttgcattggtgaatcgtcagatctttgactcaaaagatggtggcgatattcgtttcccgaactataatgaggattgggttggacgagctacctataactggcgcgaacgttatctggcggagatgaacatttcatatacaggttcggagaagttcgcacgtggacatcggttcggtttgttcccttctttctcattaggatggcggttatctgaagaatcgtttatcaagaaacatttgggagacgtacttacaaatgccaaaattcgttactcgtggggaaaagtaggatcggatgccggagcaagtcgttggaactatattcaatcgtttacctccggagaccatctgactttgggcactgatgctaccggacataattggggaccgctttatacagaaggttctatcgctaatctgggctctacttgggaaaaatcaaccaaacaaaatttaggtatcgaaattggtctgtggaataaattgtcattaacgcttgacttgtttgacgaaaagcgtagggatatcttaatgacacccaataccacatcttctattgcgggagctacttttaattcgttgaatattggaaaaacgaagaatcatggtatcgaactggagttgcgttgggatgataagattggtaaggattttcattattatgccaattttacaatggcgtcaagcgagaatcgtattgtattccaggatgatccgtataaatctccagaccatttgaaaaaggcgggaaagccgatcgggcatcaagcacggtatttggcaataggtaactatggttctattgacgatgtatttaattatgctcaaagcggcactatcaattccatatcaccgaatcaggtgattcctggtgacttggtatatatcgattttgatgctaacggtattctgaacggtcaggataaggtggcggtcgatcagttgaattatccgcttcatacctatggtcttgatttgggatttaattggagagggttgagtttcagtgctatgatatatgctcctacaggtgtatggaaattggtggatacagtttatgcatcttcgtttaaaggcggaagagtaaatgcacaacttggagcgttaaatacctggtcgcctgaaacggctagttcaagtggtattcagagaccttctttacatttaaaggatgatggtggatttaacggtactgaaagcacttggcgctaccggaacttttcatatctacgtctaaagaatgtggaggttagttatcagttacctaagcgttgtctaactccaatgcgtatttctagtttacaggtttacgttacaggtaataacttgctgactttttggggaggtgacaatcgcatagatccggaaggtaatcagacaggttatccaattctgcgttcggtaacatcgggaattagactttcattctaatcttaataaaaataatgatcataatgaaaaataaatgtacatatatacttgtcggtctcatgcttttcctgactggatgtgaagattttctggataagcgtgaagatgcaggcggacttgatgaaactgctatttatgccagttatgagtctatacgtggctttttggataaagtatacagtaaactggacacttataactgtatggtgagccgtgatgcaggaagttacggtcgtacgtatgtcggcgcaatggctgatgagatgggagtagtatataataatacggtttttaataagttcttttcaggagcatggttgctgacagggaagagcgagaatgttaccgagataggtaatggaagcttaactccgattggcagggcttatccggctttgcgtatagtgaaccgtgttattgagaatatagataaagttccactgacggaagaacagcggaatgaaatattgggacaggcttatttctatcgtgcctggttctattttcaagttatcaaacgttatgggggaatgccgattattgatcgtgtatttgccggtggagacgatgatttgcctcgtgtaacttatcatgagagttcggaatggatggttagtgatatagataaagcgattgcaatgctgcctgatacttgggaagctatgcattatggacgtcctactaaattggctgccttagctttcaaagaaatggcacttctgtatgacgcgagtccgttaatgcaaaatgacctggatgccgtagtggtgaaagaatatgataaagaacgggctaagaaagcggcacaagcagcttgggcagctatcagttatatgaaaaaaaatgaatcgcttacaggagtccggttggcgacaaaagaggaatatacgaatactttctggtttcccgatacggaactcaagagggcggaacatatatggatgtgccgtaatatacagggtacgactaatcgctctatgtgtattcgtgcattttggctgtatggagatatgaccgggcagactggggcggaatctatggctatgtcatgtcctaccttgaacgcagctaacatgtacgagcgtcagggcgaggatggtatctattatccgattgacgatccgagatctggttaccagtttgatcccgaacatgcttttgtccgccgtgatcctcgtttttataataatatcctgattccgggtgatgaatgggggacgtataaggatggagctcctcattatatccgtttgtgggtaggttgttctgcttataatcagtatttgacgaattctaatacgaatgctcgtgaattgtctggttttatgtgtcgcaaattcttatggccggaagcaaaccagaaacatacaggaagtacgagtggggcggttacttatataggtaaaatagcacaaacggtatttatcagagtttcgcaactttatctggatttcgccgaagcctcttttgaagctacgggaagtgccacggctaaagtggaaggatgtgatatgtctgctgtagaagcgctgaatttaattcgtaaacgtatcggggttacaaatttgccttctgatattgtgaatgatccagttaagttccgtgaagcttatcgccgtgagcgtggtgtggagctgatgttcgagcatcatcgctggtgggatttgcgtcgttggatgattatgcatgaggtgtttaaagcgccgttcccactcaaaggggtacgcttccatccggtaggaagttatggagataaggcaggtaactatactcgtccggctagctttatgtatgaagaatttgaaatgactaaagaggtacgtaacttttctaatatgcgtaattactggtatccgcttcctcaacatgacgttgatgctcttcgcaatctgaaacagaatccaggttggtaatgaaaaacacttaatagttgatgttaatgaaaaacaaatatcatatattctttactggtatgctgtccattgcttttttcatgggagctaccgtagacacgaaagctcaagattcgatagcagtcgttagtcgtgtcaatattgaacacctgaaagcaatgcccgacttgcaactctccaatacattgcaagggcaagcggcaggtttgattgttattcctaatacgggaggtatcggttatgccaactcgacattttatgttcggggacaacatagtaacggaactaataaggctatcgtaattatagatggcattgaacgtccgatagatgatatattgcctgaagagattgaatctattgaggtattgaaagacgcatctgccaagattctttatggtgcgcaggctacgaatggcgttatcttagtgcgtactaaacgtggtcaggctggtaaacgggtgattcgttttggtgccgaatacggggtacaacctgtgactcgcttacccgaatatcttgattcttataattatgcgacactctttaatgaggcttgtgtcaatgacggcttgcttcctttgtattccgacgctgatcttcaagggtatcgtaattctaccggggtgaatgatttacttcatcccaatgttgattattataaggaatttttgcgcagctcaagtacgttccgtaaagcgacactggaattgagtggaggtaatgcaagagctaaatatgccgttacggtaggttatacaggaagttccggtttggaaaaagtaggcgatcggtctgacttgaatcgggtgaacgcccgtggtaatctggatatacgtattaccgatttcctttcggcttcggcagatgtggctgcccgtgtggaaaaaaaggactggggagctaaagatggtggcgggatgtttagtgaaatatcgacactccgtcctaatgaatatccttttatgatttcggctgaggatatacatggtcataatggtatagcggcagatgaaacgtcgttgttatttggagccagttcacgtaagtcaagcaatctttattcggatatgctctatggcggtaatacgtcggaacgttatgtcaatagccagactaacctcggtcttaattttgatttgaatgagtttgtggaaggactggctgcggaagcgtatattacttttgataattatagttatctgcgtcaacaattacggaatgattatcccacttattctattgatcgttacctgaatgctgctggagatgaggaaatacgttttacagaacgtaagaaactgaatttgccaaagaaacagtctattgcgtctaacagcacttatcgctatttcggatggaatgcgcgtgtaaaatataatcgttcgtttggattgcatgatatgggagcaaatgctgcttttcgctatacggcagaggaagctacgggtagttcacaagatttgaaagaaggtaatttcactttccgtgccaattatgcgtataacaaacggtatatgcttgaagctacattggcggcaatggggtctaacagatttcagggagataataagtatttcttcgctcattcggtaggaggtgcatggataatatctaatgaatcttttttaaaggatatgaaggctgtaaatcttttgaaaatgaaggtgagctacggtcatttaggatatgcaggggatactgacttttttctccatagaacaaattggagacaaggggataaggaggaattcaaacctagtacgggggccaatacaaccgatttgattcgtttaggtaatcctgacttgaaatgggagtattctaatgaactgaatatcggtattgaaggtcgtttcctgaataatcgtctgtctggtgaggttaattacttccgtgagttacgtaagaatataattggtatcaactctgctaaatatgcaacgataggaggaaatttcattccttctgaaaacataggtgaggtattgaatcaaggtattgatgcctgtgtaaactggaatgacaaagtaggtgaagattttacgtacaatcttgggcttaatattacttttactaaaaataaacttcgtaaaacgaatgaactaagtaatatcgaagactatcgaaagagtattggacaacctaccagtgccatttttggctggcagtcacaaggtttattcggaaaagatgtggctattgccgggcatccctttcagagttttgggaactatcaggtaggagatattgcttatgctgacttgaataatgacggaatggtggataataatgaccagacacgtatcggacagagtttcccgaagactacgttgggagtggatgtaactttaaactacaagggattcggactctatatattgggtacggcaacaaccggagtcactcaaatgttgactagcacttattactggaacaaaggacttgatggttattccgtgcttgctgaggaccgttatcatccggtaaataatcctactggtacgcagccccgcctgactaccacttcgggagtgaataattatcgcaactctacgttttggacaaagaacggttcatttttccgtctcaagaatgttgaattgagctataccttgaataataattcgaaaaaaggcataggcaagaattataaattctttgtgaggggagctaatttgtttgtattgtcgggtattaaggaacttgatccggaacagatgcttgccggtatcagcaattatcctgtgtaccgcacgattacaggtggagtatctattaacttctaaagttgatgcaattatgaaagtattgaaatatatatttagtatgatgctattgggtggcatcatcagtgcttgtgccgaccttgacactaagcttacaaacgaatggtcggaaagtgatacatggagagatgcggatatggcgcaaggtgttttgttatctgtttatcaggatgtcatgattgcgcccgatgcttgggacggcaattttctggatgctgctacagataatgcactgacccggaattatgactctaaggtgtatcgtgccagtcagggggcatttagtcgttctactaatcctcttggcaattggagcagttgctatgatcagcttcaacggattcatttgttcttggataaagggctgacagataacgtgagttatgatgtagcaaatgcaaataacgacaaaagaaccaagcgtcgtcttcaaggtgaggcactttttctgcgggcatggtgtagttttcagttattacaaatgtatggaggaaaaaccgatgatggagaagtgctgggatatccgattgtgacccagtatattactccggaagaatctgcccatcctgaaaattttaaacgtgatacttatgaggattgtgtaaagcagatatgcgatgactgtgaaacagctatgtctctgttaccattaacctattcgggaggggatgctatcttgggcgatatatcttttggtagagcgtccggattggctgctgctgcattgaaagcgcgtgtattgctgtatgcggcgagtccggcttatcaatctgaccgcgtcgtaaaattgaatggtatgggggattatacgattatcgatcaggttgcctataaagcaaaatgggaacgtgcagcactctatgcgtatgaggtgctccagatgcaagggatggctacttatgctgcgttgatacccaatgaattgtatgacggcggtgatgcacaatctgcagaatttctttttagaacattcgtaggtcgcagtcatgatattgaaacaaggcattatcctccttactattatgggaatgcacaaactattccatcccaaaatctggctgcttcatttcctgctaaaaatggtttcccgatagatgatcctcgttctttatacgataaggataatccttatgattgcgaacgcgataaccgttttttagtgaatctgtattaccaaggacgtcagtttggagctaatgcatcttatattgacgtaacacccggaggtaaagattccggctatttggatgtgaaggccagtcgttcgggatattatctggcaaagtttatcaatgcggatgtagctaatttcctgaaaccgttggaagagcaagattcacgtcattattatccgatgttgcgtaaaggagaggtttggttgaactttgctgaggcttccaatgaagtgtgggggccgaaggtagcaggccccggatgctccatgtctgcgtatgatgtcattcgtgtgattcgtgagaaatcgggagggattacgaatacgacctatcttgatgaaatggctggtacaccggagagttttcggaaactgattcagaatgaacgccggatcgagtttgctttcgagaaccaacgtttctgggacttacgtcgttggttgctgccactaaatgaatcaattttaggtatggaggttactcgtaaagaggatagtagcgaaaattttgaagtaaaattggtggaggaacggccgctcaatgatatccgctattactatcttcctttgccgtatgatgaattacagaagaatccgaatctgaaaaataataaaggttggtaataatctaattaaaagaaaataaacacatgaaattagtaaagtttttattcgtatcgttcgttgtgctggttagctttacctcatgttatgatgagtatactaacgattatgaaactcccaatatgggttttgctgtggctaaccccttgcgtacagtgattgctgatagagatatgcctatatatataggcgtatctatcggtggtaaacgtgaagtggatatgtcggattgggcaaaatttgagattgatccgtcattggtagaagagactggcaaagtattgcttccaagtaattactatacattatctgaccaggaatattttcgtgtacgtaagtctaatcttccggttgctgatgtccgtatagattttacggaggcattttataacgatccgctttgtctggaagcgcactatgtattgccatttcgtatgacagaaaactctttgggagctttacgcgagggagctgaaacaactgttgctgttattaaatacattagcacttacgccggaacttattatcggatgggaaaggtgacagaggtggatgcttcagggattgccataggacaaccggtaagttatggtgatacgtatgatatcatcaactgtagtaccgttgcttttaatagcaaggctccgcgcattgtggtttgtcctggtgttggtaatgaaaaagagggggttggtagtgtaacgctctcaatggatgcggacaagaatgtgtcagtaactggtgtggatggaaaggcggctatcagcaatgcttcaggaagttataaaatagaaggagactatgaatatgttgctgatgtcactaaacgcgctcctcaatttgatttggagtatacttatgagaaagcgggcaaatattatcatgtagtagaaaaattggttctacgtcaggatccgctttatgatttgcgcgttgagacatggtgatgagtaatagatatgattgaaacataatattaagcaaagatgaaaaaaaatgtatttctcgtgctatgcatttcttttatttgttttggctgtagtgcagaagcggaatgggaaaaattaaaagtaaaagaagtagtgaagacggatcctgttattgattggtcggctactgctgatagttgtacctatgttcttattgagcagtttatgaataaagaaaaaggaactttctggaaatcaccgaaagatgtgagtggaggctcgtataatatttattggcaacaggcacatgcgatggatgtcgttatatattcttatgagcgtataaaggataagaatccggcattggctgccacatacaagaattatttcaaattatggtttgataataaggcgaataattatcatcatagtgacagtgatgaaactggatttttgaatccttttacggatgatatgtgttggatttgccttacgttgatacatttgtcggaagctaccggtgatgctgtttatataaatatggcaaaaaatatttatgatacacatattataacccgggcatggacagatgctaaaggaaccggattgccttggaaaagcgatgataagagccgaaatgcttgtacaaactctcctggttgtttagttgctgccaagctgtataggaagtttggaggagaaaattatctcgaagatgcgaaaatgttatataaatatattgtgggtagtttactgaaaagtgacggaagagtggaagagcctcctttgacatatacacaggggacttttggagaggcatgccgacaattatatcatattacgcaggaacgggaatatatgagaaaggctgaattggtaataaactatacaatgactagtgatcgttgtttgcaaaactggattttgcgggatgaaggaacaaatatggatggaagtatttttaaagcggtatttgtgccttatgctgtaaatttggctttggatgatgatacttctgattttgtgaaaaagcgtattaaaacttttttgttggacaatgccgaagcattgtggaaaaatatggatagaagaaaatatcctgctatgtattgcaattattattggggtagtatgtttccttccaatgaaattgcatccatgggggcacaggcaagtggtagctctttaatggaaggagttgcccgaatgatggtgactccggaaaaataaagttatctttgtagcccaatataattaaatcgagcttatgaatcatcggttccgttgttcttgcattatcttgttcattttttattcttgtattagtcatctttatgggcaggtgcaggcagtatctaccgttgatacaggatatgaactttggttgaattacaaatccggctccaattcccgattgaagcaagctgctattcggtatgccagtcaggttcgtttggcgggaagccagtatgatgaagtaataagagaggaattggagcgtgctttaaaagcattgctggaaattacaccaggttttgttcgtggtgaagaggctggaattcagatgagtttctgtacagataaaaggctgggtaaggaaggatatatcatccgtagtggtaaaaagaggataacacttcaagcctattccgatgcagggtttctttatggcacgttccatctgattcgattgattcaatgtggtgaaccacttgtacaactgaatataagagagatacctgcattggaatttcgacaacttaatcattgggatgatttaaatggaaatatagagcggggatatgctggtaagtcgttatggaaatgggaggagttgccggagaaagtcgatagtagatatactgactatgcccgtactaatgcatctataggcataaatggagtcgtgttgaataacgttaatgccgatcctcgtattttgcgcagggactatttgaagaaagtagctgccttggcagatgtttttcgtaaataccatatacgggtttatcttacagctaattttgcagcacctttaaaaccgtcggcaactccggatgtgatgaagcaatggggagggataggtgaccttgatacagctgatccgcgagatcctcatgtacaagcgtggtggaaagcgaaagttgatgagatatatgagctgattcctgattttggcggatttttagtaaaggccaattcggaaggtatgcccggtcctcaagactatcattgtactcatgcagaaggagcaaatttgttggcccgtgctttaaaacctcatggaggcattgtgatgtggcgcacttttgtttataatccagagattgataaagatcgtatcaaacgttcttataaagagtttcttccgcttgatggaaagtttgatgacaatgtggtcttacagacgaaaaacggggcacttgatttccaaccgagtgaacctgcccaacctttatttgggagtatgaaatatacttctttgatgccggaactccagattactcaagaatatacagggcattctacatatctggtttatttattgcctatgtggagggagttcttggattttgatacctatagtgaaggaagaggaagtacagtgaagagtattattacaggtaggactgcttcttatccctttcgtgcaattgcaggtgtggcaaatactggagatttacagaattggacaggacaccactttgcgcaagccaactggtttgcttttgggcgtttagcatggaatcccgatgaagaaacagaaaaaataacttctgaatggataaagtctacctggaattgtgacgaacaaactctaaaggttattgaacaaatgatgatgccgacttgggatcgctttgttcgtagtcattcgccttatagccttggattaactactctggtaaaatgtcattataaagcaggattcggaatacgtgccaataaagagtggaaaattagtaaagaaagtattggtaatgatcgtactgtcaatgggtctgattatgtatctcaatattggaggcctaatcgttcaatctttaatgatataaatctgtgccctgaactgtatttgctctgttttcataatgtatcgtgggagcatagaatgaaatccggtttgactcttcgtgaagaattaaccgctaatttaaaactgggaatagaacaagctgataaaaatatccggctttggaaatcaattcgtcataagattgattcccggagatttgcagaggtaatggaaagtcttttgaaagaacggagagatgctgaaacatattacaatgttgctattcatttttttgatctttataagtaaaatctgtattggatgagttttgatgtgaaaatggttattttttgttctttattgaatggctattttcgtaacttattggaaagattgccgaactttgggtgtgagtaattcatacacttcttgttactaaacttattacgatattatgttatgaatagaaaagttttattctcaatctctgctgtttctggtatgataaatatcatcccaatgtcggcacaaacacccaaacccaatgttgttatcatcatgactgaccaacagcgagctgatttgtgtggtcgcgaaggttttccgatggctgtcactccttttgtcgattcactggcattgagtaatgtctggtttgataaggcgtatacggtagctcctgctagtatgcctgcgcgttgttccatgtttacaggacgttatccgactgctacgcatgtccgtacgaaccacaacactcccgatatgtattataagaaagatatgctcgaagtgtttaaagaacaaggatataagacggcattactgggaaagaaccatgcgcatgtgaaagggaaagattttgattattgtgaggaatattttcattggggaaagaatcagcgtgatacgcaggaagataaggactttgcattttttctgaataataaagcgagaggtcaatatttggaagccacccctttcccggcagaagcgcagaatccggtgaaaatggttaccaaagctttggcttgggcggagcagcaaaaagattccgcattctttatgtgggtttcaatgcctgaaccgcataatccatatcagatatcagagccttatttctcaatgttttctccagaaaagataccggcaactttgactagccggaacgatttatctaaaaaaggaaataagtatgagattttggcggaattggaagatacagcctgcccgaacctggcaaaagatcttcctcgtttgcgtggaaattatttaggaatgcttcgtctgattgatgaccagaccaaacgtctgattgaaggattcaaagcagccgggctttatgaaaatactatttttgtaatcctgtcagaccatggggattattgtggggagtatggcttgattcgtaaaggtgcaggagtgcctgaatgtttgacccgtattccgatgatttgggcaggatataacattcatccgcaaaaatctcctatggatgcacatgtttctattgctgatgtatttcctactatttgtacagcaattggtgcagatatacctcttggagtgcaaggacgcagtttatggccgatgttgacgggtaaatcgtaccccaagaaagaattttcgagtgtaattgtacaacagggattcggtggtgaagatttcacccgggatgaaccgttgacatttgctaaagagggggctttgcaacccaataaaatagctcactttgacgaactgaatacctggacacaaagcggaactgaacgtatggttcgcaaagatgactggaaactagtactcgacaattatggtcgtggtgaactgtataacttgaaagccgatccttccgagattaataatctttataataaaaagaaatatgcctccaaacaaatggaattgctggaagaattgatgacttgggaactgcgtgtacaagacccattgccggtgccaagaaatcgttatcattttaagcggaatccatataactatcattttgaagataaaaagaaatagaactgaataactagaactactgtatcaatgagaatcttttcgctattaatattattggtagtggcatctgccctgcaatcacaagtggttgtgaatgagaatgtaaaacatagtaaatatactttcccattagtcgcatcgaaaataaaggcgaccgtgtgttatgatgccaatgattacccggttgtaaagaaggttgccgaactgtttgtgtctgatattgaaaatgtcacaggacagagattaaaattggcagatgaatggaagaaaggaagaacagtggtgattgtcggtactattgaaaaaaatcaggcaattcgtcagctagcctccaatgggaaaatagatatatctcctttggaaggagcatgggaacgttatctgattcagacagttaatcatccttttccaggagtagataaagcgttgattgtagccggaagtgacaggcgaggagcttcttacggtttgttttctctttcggaaatggcaggtgtgtctccttggtattggtgggcggatgtccctgtgaagaaacataaaacactttatgtggatgctcccacctctgtttccaagacctcttccgtcaaatatagaggcgtttttctgaatgatgaagattggggactgaaaccttgggccgctaagacttttgagaaagagcgtggcaatataggtccccgtacttatgccaaaatatgcgaattgttgttacggttgaaagccaatcatctggctcctgccatgcatccggtgtcgaccgcattttataagatacctgaaaataagttggtggcagatacttttgctattgtaatggggtccagtcattgcgaaccattattgttaaatacagctagtgaatggaattcaaaaacgatggggccttgggattatggtaaaaataaggataaaattaatgaagttctaggaaaccgtgtaaaggaaaactgtgcttatgagaatgtatatacattggctttgagaggattgcatgatgcggcaatgggaggaggtgatgtccccatgaaagaaaaggtcaaaatgctggagagtgcgttgaaagaccagcgtaatttgattgcagaacattttgatcgaccggttgaaacaattccacaggcatttactccatacaaggaggtgttggaaatctattcgaatggattggaattgccggatgatgtaaccattatttggccggatgataacttcggctatatgaagcgcttaagtggcctgcatgaacagaagcgctccgggcgtgcaggtgtttactaccatgtctcttatctgggagttccccatagctatttgtggtacagcactactcccccggctctgatgtatgaggaactccgaaaggcttatgatacgacggcagaccgtatctggctggctaattgcggtgatttaaaaggagccgaaatgcaagtctctttattccttgatatggcttatgatatagatagctttaatgcgaataatgtggttacctatcccgcccgttggttggcaaagatgtttggggagcagtattatagcgtatttgaagatatcacttcttcgcatatcaatctggccttttcccggaaaccggaatatatgggttggggatattggaataattattggggcgggggagagaaacgtacggatacggagttctcttttgccaattataatgaagcagaaaatcgtctgaacgaatatagccgtattgggaagaaagcggaaaatcttttggcatctttggataaagacagtcagccggctttttatcagttattatactacccggtgaaaggtgccgaactgatgaaccacatgactataaaaggacaatattatcggcagtatgttcgtcagcagcgtgccgccgccaatttgataaaggagaaggtaaagaattaccatgatagtctgcaaatcataactgaagggtataattctttgttgaacgggaaatggaaatatatgatgtctttgaaacagaattatgaaggttccagttcttactttatgctcccgttgatggaagaaagttatacaccggttggtgctcctaaattggctcttcaggcagaaagtgaaattttggataaaggtgggataagctatcatagtttgcctgtttataacactttttcccgtaaaagccattgggtcgatgtgtataatcaaggaagtggagatttgagttggactgcaaagtcttcggacgattggattatagtgtctcaaaaagctgggaaaactccgacagaggaccgaattagggtatctgttgattgggagaaagttccgattggagagagtattaaaggttctgtggagtttaggtctaatgatcaaaaagaatgtgtattggtttctgtttttaatccggcgtctcctgtgcgtgatgagatgcaaggagtgtatatggaagagaatgggtatgtctctattccggctgcagggtttcatcgtaagtttgagagtaatgacataaaaatgaatattcttcccggggttggggttgaagggcatgctttgcaattagggaatcctatatctcccttacagatgtatcgtgctggtgatgtacctagagtggaatatgatttttatacgtttaatgccgggatttatgatgtgtatacctatgttctacctacattccctttgcacgcagaacgagactataaattgccggaacatactaattcggacacaaagtatagtgtccgtatagatgatggttctatttctactccttctacttctgctattgagtattctcaagtttggtatgatagtgtgctaaagaattgtagagtgaataaatctactttgtatgtgaagaagccgggcaaacacactctacagatacgttgtggtgatcctggagttgtcattcaaaaaatagtcatcgacatgggaggattaaaacgttcataccttggacctgaaagtacaaaatgtaattagtctaattgattggagaaccagatggctttgccatgggttctccttctttttgtggtattcccaatataggcatcctatctttgtcccactctattttttgtaagcggggagtacgtgagtccattgcacccggagcatcattcggtatctgacgggcatgataaagcatataacattcctttccatccggtgaagagacgaaagaactgccgccggggccaaaaacttcattctccggtttctgctgaaatacaggtatcggatgtttcttccaggaagcaggatccaacaggttggcattggcgtctgctgttagtaatcctacacaataatagggagtccagctaccgctggcggaataaaaaatgcatactttatctttattcttcggctgaaagaaatgaggtgcttcgttcacatggatcggataggctgttttgctgccatcgggattaacccattgacactcccattcatattcaggtttggaaatcaggactctgtcagaagaaagagtccacggatttttcatcgaagcgatgtaaatacattgtgtctcgctgtcaattcttcgtttttgccatccgcaccaaatcatgtaacgctgtccgttgtgttcgaaagtactcgcatgaattgcccagttattatctttgtcggtcggtatgcgccctttcatgacaaacttaccttctgtaggaatatcagcctcgttttcgatcacataaatctggtgattgtccatgttgccatcgtctgcagcgaagtaaatataccatttgttgttgatgcgatgcatttcgggggcccataagtgatgggaattacttgggtcggttggtatccatacaggttttctaagactatcattcaaatttgttatgtcactggtttcccaaagcataattctactttcagagccttgcgtataataatattttccttcatgaaaaacagcccatggctctgctcctctttcacgtagcggatttgtataagtagctcctgttacggctttcttttccggctctgttttcttcttgggtcgacaggatacacaaataattattaaaagtacggttaggaataacaatctgcttctcatggtattttttacttaataataatattgcaaagaaagcataaaatcttgataaatcatcttttttttgcagattggttagtatttatccttaattggttcgtatttattgaattttctagttgttttttctcatctttgcagcacgaactttaaaattgatattgtatgaaactgaagcaccttatccttcttagtattatttgctgttcccagtctgtatttggacaaaaagccaatcaacaaccgaagacgagtggcaatcctgtattcccgggatggtatgccgatccggaaggagttgtatttggggatgaatactggatttatcctacgtattcggcgccttatgacgaacagactttcatggatgccttctcgtctaaagacctggtgaactggacaaagcacccgaaagtgttatcaaaagagaatattagttggtttaaacgtgctttgtgggcacctgccgtgattcatgcgaatgataaatattatatattcttcggtgcgaatgatattcaaagcaataatgaactgggcggtattggtgtagctgtggccgacaatcctgccggaccatttaaagatgcgttaggcaaacctctgattgataaatttgtaaatggtgcgcaaccgatcgatcagtttgtttacaaagatgatgacggacaatattatatgtattatggtggctggggacattgtaatatggtgaaactggccccggacttgttgagtatcgtaccgtttgaagatggtaccctttataaggaagtaacccccgaaaaatatgtagagggaccttttatgttgaaacgtaacggaaaatactattttatgtggtcggaaggcggttggaccggaccggattattgtgttgcttatgccattgccgactcaccgttcggacccttcaaaagagaagcaaaaatattacagagagatcccaatattggaacaggtgccggccatcattcagttgtaaaagggccgggagaggatgaatggtacatcatttatcatcgccatccattgggtgaaacggatggaaacgctcgtgtgacctgcgttgaccgtatgtactttgataaagatggaaaaataaaacccataaagatgactttcgagggagtaaaggcaagcccatttaagtaaaatctgaaaagttcagcccgtccgtaattaatattttaataaagatgggctttttttgatttattgttttatttttgtccttgtaaatcaaacatacttattataatgaagccagatatacacactctttccgactcccttttgtggaaaaggtttctcgagggagattcgagtgcgtatacccaaatctataatcgaacggtgcaagatctgtttcgattcggactattatatacttcagacaaagaattaatcaaagattgcatacatgatgtgtttgtgaaaatccacgtgaatcgtgcaaagttagccccaacagataatattgcagcttatttgacggtagcgttgaaaaacactctttttaatgcgctaaaaaaaacaacagattctctttcgtttgatgaaataggtgagagagaagagacggttgacgaatccccctccactccggaaactatatatattaataatgaacaggaaaaacaagttcaggcaaccgtacatactatgatgtctgtattgacggacagacagcgtgaaattatttattatcgatatatcaaagagatgagtatcgatgaaataagtaaggtgacagacatgaataatcaatctgtttctaactccattcaacgggctttgggacgtatccgggacttatttaagagaaaataagagagaataatcagcctatttttcctgcctatcaaaaaaaagtggaaaaaacttcggaaaaggtgagtataaaatgaaagtacaactgttattcatacgtaaagacaatgaaaatgatgaactctgaacaaaaacatacagatttttccctatatacttttgaagaattccttcagaatgatttctttatttcttccatgaatcatcctacggaagaaacacagaagttctgggatgaatttgaacagatgaatccttctaatatagatgaatatatagcagcaaaaagatatttggaggttttttcaaaagagaaagaagaagtactttcaaacgaggaaacggatgatttatggactcgtattcaggcaaccaatataaataaggagaaggcgaaacgtaagaactatttcttaataggattgagctcggcggccagtgttgctattcttgtgggatgtttcttcttattaaagagttattcttcggtgctggatccggatattgccacttttgcagtgaataccaaagctgatttgcctctgacggaagaaacactattgattttggcggaagataacgtagtgagcctgaaagaaaaagaaacggagattacgtatgattccgtagaaatcaaaacaaatcaggaaagtatacaaaaggaaaaatcggcagcttacaatcaattggtcattccgcgtggaaagcgatcggtattgacgtttgccgatggatctaaagtctgggtgaatgccggcacgagagtgatttatccggtagagtttgaaaaagataaacgtgaaatctatgtggacggagaaatctacatagaagtagccagagatgaaaaccgccctttctatgtgcggactaaagatatgaatgtcagggtgcttggtactaaatttaatgtaacggcgtatgagtcggaagcgattagaagtgtagtgctagcgcaaggatgtgttcaggtagaaacagcccggactccgaaagcgattttggctcctaatcagatgttcagttctgccgatggaaaggaaaatatatcacaagtagatgtagaacaggcaatatcgtggataaatggactctattgtttccaaagtgccgatttgggaatagtcttgcaacgcctgtctacctattatggtgtgaatgtagaatttgacccagcgctaagtaaaataaaatgttccggaaaaatcgatttgaaagacaactttgaaacagttattaatggattaacctttgttgcaccaatttcttatgcctatgatgaacaatataaaacgtatcgagtagtaaagaaatagatataaaaaataagataataaactaatctaactcccgtattttatggtaattattgaagagagtggatgatacgaactatcatccagatgggacttgtgtgcctatgaatgtttatatacagaaaataatattatgagaaatttttaacatgtttaatatgaaaaatgcaattagagaacgaaagagtaaggttctcgggctattcctgtgctttttacttctcggaatagactactctttcgcaagttacaacaattattctcaatttaagaccctttcggtcagcatgagtaactcgacgttgagagaagtgcttaaaacaatagagaaaagtagtcaatttgttttcttctatttagatgacgctgtcaacttagaacgtaaggtatctatcgacagtaagaataaaaatatagaagaaatcctttctgaacttttcgaaggtacttcgtgtacttatcggatctctgacaggcaaatatttatttccggaaaagcccctgcttcaaccgaacagcaacagaataagcggaaaatatccggacgtgtcactgatataaaaggagagccgcttattggggtcaacgttactgtggatggagatgcaaacggttcgattacaaatatggatggtttgtatgagatattcgtaaccaagaagagcgtagtgcttaaatttacctatatcgggtttaaaacttctgaaatacgaaccaatgcttcgaccaacatttatgatgtcaccttggaagaacaggtcaacgaattggaagagactgttattgtgggttatggtacccagcgtaaaataagtaatatcggtgcacagtcttccatgaagatggaagatattaagacgccttctgccagtttaacaactacattggcaggtcgtttggcgggtgttgtggctgtacaacgtacaggagaaccgggaaaagatgctgctgatatctggattcgtggtatttccactcccaacacttcttctccgctagtattggtggatggagtggaacgttcgttcaatgacatcgatccggaagatattgaatcgttgacaacgctgaaagatgcatcagcaacagctgtgtatggtgtacgtggtgccaatggcgtaattttgattaaaaccaaaccgggaaaggtaggaaaaccgacagtgagcgcggattattatgaatcgtttacccgtttcacgaagatggttgatttggcagatggtatcacttatatgaatgcagccaacgaggcaatgcgtaatgacggtattgctacgaaatatacagaagatcagatacgtaacacgattgctggtaaggatccttatctatatccgaatgtggattggttgaaagaaatctttaatgattggggacataatcgccgtgtgaatgtaaatgtacgcggtggtagcgagaaagtcgcttattatgcatcagtcagctactttaatgagacaggtatgacggtgactgataagaatatcgacacctatgattctaaaatgaaatatagccgttataactttactaccaatttgaatatcgacgtaactcctactactaaggtcgagatcggtgcgcaaggttatctgggagaaggaaactatccggccatctcttctgccgatttgtataatgcggcaatgtctatctcaccggttgaatatccgaagatgttctttgttaatggagaagcctttgtgccgggaacttcaaccaataataactttaacaacccttattcacaggctacacgtcgtggttatgacaacctgacgaaaaatcagatttactctaatttgcgcgtcacacaggatttggatatgcttacgaaaggactgaaactgactgctatgtatgcatttgacgtatacaatgagatacatgtacatcaggaccgtgcagagtctacctacaacttcctggacactagtgttccttacgatatgaatggacaacctattctgcaacgtatttatgaaggaagtaacgtgttaagctataaacaggaaacgagtggtaacaaaaagacctatttggaggcttccttgaactatgaccggacattcaacgacgatcatcgtgttagtgcgttattcctgttcaatcagcaatccaaactattatatccgaaagggacattggaagatgcgattccgtatcgtatgatgggtattgccggtcgtgccacttattcatggaaagaccgttacttcgcagaattcaacatcggttataacggtgccgagaacttttcacctaaacatcgtttcggaactttccctgcatttggtgtaggatgggttgtttcaaatgagaaattctggcaacctctgtcgaaggcagtttctttcttgaagatacgttatacggatggtaaagtgggtaatagcgaagtttccgaccgtcgtttcatgtatctggatcagatgaaagaaaatggagactatggttataaattcggaccgaatggaactaagtggtccggttatgaaacagtgaatatggctgttgacctgatttgggaagaatctcgtaaacaagacctgggtattgaccttaagctatttaatgacgatctgtctattgtattcgacttgtttaaagaacgtcgtgaaaacatcttgttgaagcgtgaacattctataccttcattcctgggatacaacacatctgctccttacggaaacatcggtattatagaaaataaaggatttgacggaacgatcgagtataacaagcgtatcaataaagactgggtaattgcgcttcgtggtaatgtcacctttaataaggataaatggattcagggagaattgccggaacagaaatacgaatggatgaaccaatatgggcacaacatcaatggagtgaaaggatatgttgccgaggggctgttcactcaaactgaaatagatgatatggcacgctgggaatctttgtcggatgccaataaagccattactcccaaaccgtttgcatcacagtttggaacagtgaaagccggagatatcaaatacaaggatttaaacaatgacggtcagatagacgcatacgaccagacttacatttctcgtggtgatgtgccgacaactgtctatggtttcggatttacagtaggttggaaagacttgtctgtgggtatgatgttccagggcgtagcaggagccgaacgtgttttgaatggtagcagtgttaatccgtttaatggcggtggcggtagtggtaacctttactctaacattggcgaccgttggacagaggaaaatccggatcagaatgccttttatccgcgtttgtcttatggaagcgaaacaaccagtaatattaataacttccagaaaagtacctggtgggtacgtaacatgaacttcctgcgtttgaagacattgcagatctcttataatctgcctaaaccctgggtgaataaagttcatctgaagaatgcggctgtatatgtaatgggaactaacctgttcactttgagtcgtttcaaattgtgggatccggagttgaataccgataatggtgcttcttatccgaatacgacttcttattcagttggtattaatttcacattctaaacaaaaagataatgaaaaaatataattatataatcgttagtttgctggcgtgtctcttgacgacatcttgtaatgactattttgaccaggtgcctgatgaccgtttatcactcaaggagattttcacaaccagagatggagccttgcggtatctttcgaacgtatacacattcttaccggatgaatttaaccaacgtcaggtgcatgaaacaagtctgtaccgtactcccggtccttggacaggctccagcgacgaagcagagtggacaaatgacaataaagggaaattgataaataacaactctatcgatgcgacggaaggaacgatggtgttgtatcgctggaagagctggttttcaggtattcatgaagcggcagtatttacagaaaatgtagatcaggcaccgctgactgttacagaaagaaatcaatggaaagcggaagcaagagctttgcgggcgatctactatttttatctagtacgtacttatggtccggttcctttgcttgaaaaggacttcccgatggatactccgagcgatgagttgcaactccctcgtaatacggtagacgagtgtttcgattttatcgtatcagaactgaaaggtgcgcaaaacgatggtttactggacgatgcttctaccgacaaagtgtccggatatggccgtattgataaggcgattgcacaggcgtttatcatcgaggcattgacttatcgtgccagctggttgtttaatggtgagtgcaattactattcagacctggctaatacggacggaacaaaactgttccctaacaaaccggacgaagctaccaaacgtgctaattggcagaaagtgattaatgaatgtaacactttcttctctaattatggaagtcgttatcatttgatgtataccaataaggacggtgtttctgtttccggtccggactcggaaggcttcagcccgacagaatcttatcgccgtgcagtaagaaccctgttttctgaaatgggtaacaataaagaaatgattttctatcgtttggataatgctgccggaaccatgcagtacgaccgtatgccgaatagatccggtaatacgactaattatagaggtggtagcttgttgggagcaacccaagaaatggtagatgcctatttcatgtcaaacggagaatctcctatttccggttatagtgctgacggagtcactccgattatcaacgaaaaatccgattatgtagaagagggagtctctacaacagaatacaaaggaacagacggtaccttatatgcaccggcaggaaccagaatgatgtatgttaatcgtgaacctcgtttttatgtagacattacctttagtaattcaaaatggtttgatggaacagaaggcgattatatagtagatttcacttatagcggaagttgtggtaaagaacaaggtagcaatgactatacaagtacaggttatttggtgcgcaaaggaatggattccggcgaccgtaaccagaacttggtttgtgtgctcttgcgtctgactaatatttattttgactatatcgaagcacttgcgcatgtcagcccgactcatgaagacatctggacgtatatgaacatgatccgtaagcgtgcgggtattccgggatacggtgaaacagtcaatctgcctaaaccgactacaacggaagaagtcatggagctgattcgtaaagagaaacgcattgagttgagtttcgaaaactgccgttattttgatgtacgtcgctggggattggtaaatgagtatttcaacaaggcaattcacggtatgaatgtcaattatgacggaaatgaattcttcaaacgtacggagattgtgaagcgtatttttgaccgtcagtacttcttccccataccacagggcgaaattgatattgataaaaacttggttcagaatacaggattctaaatactgattataaaatagaaattatgatgaaacaatatattttctctgcagtttgtctcatgtccggtgtcctttgtatgtcctcttgcaatgaggataaacaggcaaagccatataccccggattacgagattgtaccggagtataccaatgcggatacctggactgcctatgaagcatttaatgataacttgctggatcccgataagaacatttataaaacaagtaccgcttatactgctgctactgaccgtaataacggagctgctgctatctggtgccaaccgatctattgggatatggctatgaacgcatataaacgtgcaaaagcggaaggggatacggaaagagaaaacaaatacaagcagttgtgtgatgatttgtttgccggaaataaagcacattatgtaaactttgatttcgacgataataatgagaataccggctggtttatctatgatgatatacagtggtggaccattactttggcacgtgcttacgaattatttaaagtggaagagtatcgcagtctggcagaagcaagttttgcacgtgtatggtacggttctccccgcgtaggtgatacgggttcttatgcagatcctgaaaagaatttgggtggaggtatgttctggcaatggcagcctatcggcaatccgaatgaaaatgcagccagcgatggtaagatggcttgtatcaatttcccgactgtggtagctgcattgaccctttacaacaacgttcctgccgatcgtgtggctgatccgaatccggaaagctggagtaataagtacggtgattttacccgtccgcattatgaaacgaaggaagcttatctggcaaaaggaaaagaaatctatgaatgggctgtgaagaatctggtagacagcaataccggagaagttgccgacagcaagcatggtgaaggcaatccggcatggtcggaccatgtatacaatcaggccacttttatcggagcttcgttattgctttataaagctaccggtgagaaaacatatttggacaatgcaattttaggagctgactatacaatgaataccatgtccgaaacgtatgatttactgccgttcgagagtggcgtggaacagggtatttataccgctatctttgcggaatacatggccatgctggtgaatgattgtggccagacccagtacgtaccgttcttgaaacgtaacattaattacggctgggctaatcgcgaccggacacgtaatttgtgtggtggcgaatatcataaggcacagatagaaggcgctactattgacagctatagtgcatccggaataccggcattgatgttgttgtttccggcagataaataattgtaacccataaaaaagaagaataatgaatacgaaatattcaaattggaaaatgtggtattatgtgttatgcatggtactgacacttcaattggcggcttgttctgaagaaacgcatgacgagtataccgcggctcctgaaatagaagatacctatatcgaccaactggatgcattgattgctgaaatgaccgatttgcagcaaaattcagactacggagataagaaaggacagtaccccaccgaaagccgggcaattctgacagatgcgatagatgatgccaatcgtgcggtacttttaatcaaatatcagcaaccctctccgtcggaaagtgagaaacaacgctatgtggcagaagccaaggcgtctatagaacagttcaagagtacgatccgtacagaagacgctgaaacaacaccggctgaactgtttgtggacggacgtggtgatggtggttcttatatcgatttcggacgtagcgaagaatatgtcaatttcggaaccgaaggaaaccaagcctttactgttgagttttgggtgaaagtaaccaaaggtggtggaaaagaccagaatgtgttcctgtcaacttatatgggcggtgacggatggcgtaatggctggatgatgtactggcgtaatgcggacggtggtatttatcgtgcaacttggggcgaaacaggaggaaatatctgtgaaccgtcactaaaggcaccggaagatggagaatggcaacatttcttgtttgtgtacagtgataaaggcttgccgggcagtccggagcttcgtgcgaaattgtatgtgaacggagaagtgaaaacaaccgagggaagcgtgggtaacaggttctataattcgagcaactatgccaactataatgcaccgatgaccgctttcggacgttatatgcgtaccagtgataatctgtttgaagaaggctttgccggttatatgaagaaaatccgtatctggaaaagcgcaaaggataacgaatatgttcagaattcttataatggaacggctgaagtgacgggtaaagaagcagacttggcggcagcatgggatttcatgaccaaaccttccggttcgggtaatgaagtaatagacctgacaggccgtcatactgctaagattatcggtacttacgagtggcaacgtattgttgaataataatgtaaaaacgatgaaaaacatgaaatgtttaactaataaatggagagagggagcaatgctcctctctttcctcctgatttctagtctggcagggatatttaccgcttgtgacgatattgaagacgagtatataacagatacacagttgagtatcttgcaggaaaatcgtgcgtcattgaactatttattgaagaattcaacctacggaactgctcccgggacatatcctgaaaccggaaaggatatattaaatgccgctattaccgagttggatgcactgataacacgggtagaagctggcgaagaactggatgaaacaactttggaaactgctgtagcaaaggtaaatcaagcgattgacgagtttaaaaattcaaaatattacaatctgtctccggaagcacagcaatatatcaataatttactggctaaggcggatgaaatacttgcaatcgtaaatgatgaaacgaagtggggaaatcatcagggacaatatccggtagaaaataagtcggttttggagagtgcagctaaagacttggaaagtctggctgaaagaatcaaatccggttccatcacagatatgacgcaggagatttatgatgaggctattgctgctgccgataagaaagtagaagaggtagaagattctgcatggccggataacagtcagattacctggaatctgtttgtagatggaaatgccggttcctatatagactttggttatagtgaggattatgtgaagtttggagaggatgacaatcaggcgttcacgattgaactttgggtaaatatcaaagaatattgcaataagcagggagaagataactgtactttcctttctaccatgacaaacgatccttattggagcggatggcgtgcccaggatcgtacgaaaggattattgaggacaatggttgctcactgggaagatgataatcatacaaatcctctagaatgggaaccgggatggaaaaagtcggacaactggaccaaagatcgttggacgcattatgcattcctgttcagggataagggactgccgggatttgatactccgacagatgtgaagtgttattccatgattgacggtacgagacaaggagatcctattcgtgtgggtgagtcctggagaacgtatatcaatgaacaatccatagctaatcagattcgcatgaccggattctgtatgatggacaaaaatggaaatcgtaacgaatggttctccggttacataaagaagatccgtatctggaaaacaaatcggacagaaaatcaggtatatgcttcttatatgggtaatgaagaaggtgtaagtgccgataacccggatttggtagatgcttgggattttgaagtgaaaggtgatcagcctactcaaagtgctaccaatacaataacaggtttgaaaggccatacggcgacattagttggtgataactggcaatggattgaatccacagacattacagataacaaataattgtttaccgggatgagttttcaataggtagattaaatattccccttatctctgtcataaggacagagtgaggggaaattattctccaatacccctttattaatcctttatttttattgtagaaaagtgttttggtctgtatttgttctttattgaataaatattatcgttttttttcagctatttctgcaatctttgtaacaggaaaaatactataaacttataaactatcatgaaaggcaaaattcttttggctctgacactactattgggagtatcaactaccacatgggcagtcggcaattcaggaaaagcaaaccagaagaagcatgcgtatacgaacgaagatgtatgggcagcttatgaaggatttaataatacactactagactccaataaatatatttacaagacaaattcgtcctatccaagtgctgttgaccgtggcaatggagcagcggctatctggtgtcagcctatttattgggatatggcaatgaatgcctataaactggcaaaggcacagaaagacagaaagaagacaagttattataaaacactctgcgagaaaatattcgcagggaacaaagcgcaatattgccagttcgattttgatgataacaatgaaaataccggctggttcatctacgatgacatcatgtggtggactatcagcctagcacgcggctacgaactttttggagtggatgaatatctgaaactctcggaagctagtttcaaacgggtatggtatggctcggaaaaagtcggtgataccggttcgtatgacaaagaaaacgggggtatgttctggcaatggcaacccattcaaaatccgaaaccgaataaattcggtgatggaaagatggcctgtatcaactttccgacagttgttgcagcattaaccctctacaataacgtgcctgaaaatagaaaagaatcgaccgacaaacggccggattatcagacgaaagctcaatatcttgccaaaggtaaagaaatctatgaatggggagtggaaaatctcttggataaagtaacaggaaagattgccgatagccgtcatggaaatggcaatcccgcatggaaagcacatgtctataatcaggcaacctttatcggagcctccatattgctttataaagcgaccggagagaaacgttatctggacaatgctattctggcagcagactatacagtgaaagatatgtctgcagaacataaagtgctacctttcgaaggtggtattgaacagggtatctatactgccatctttgcggaatacatggcatggttggtgtatgattgcggacaaacccaatatctcccgttcctgaaacgtaccatcaaaacaggttgggcaaacagagataagacacggaacgtatgtggaggcgaatactataaaaagttgccggaaggtgcggaaatcgacagttattctgcttccggtataccggcattgatgcttttgtttccggctaaaaaataaatagaaaacgacggaatttgcgtaaaatagattaaataaacaggtgatttaaattatgaaacaacaactgatgatgctgttactgggaacagcttctgtattttgtagctgtgagacccaggtagaacagcacgagaagaatgaattacgtgctccggcatatccgctggtgacaattgatccttatactagtgcatggtctactacggacaatctatacgacagtcctgtaaaacattggacaggcaaggatttttctttacttggtgttgcaaaagtagacggacaaacctaccgtttcatgggaacggaagagctggaactaagacctttggtgaagacatccgaacaaggtagctggacaggaaagtataccactcaacagcctgctgacggatggcagaatgccggattcaatgataaagcctggaaagaaggcgaagctgccttcggaaccatggagaatgaacatacagcaaagactcaatggggtgaagaatttatctgggtacgccgggtagctgatattcaggaagacttgacaggaaagaatgtatatcttgagttctctcatgacgatgatgctattatctatatcaacggcatcaaagtggtagatacaggtaatgcttgtaaaaagaacgagagagtgaaactgcccgaagaagtggtagcttctttgaaaccgggtgagaatctgattgccggctattgccgtaaccgtgtaggaaacggattactggatttcggattgttggtagaactggacggttaccgttctttccatcaaacagcacaacaaacatctgcagacgtgcagcctatgcagacttattatacatttacttgtggtccggtagatctgaaactgacatttaccgctcctatgtttatggataatctggatttgttgtcacgtccggtcaactacatttcttatgaagtagcttccaatgacggtcagaaacatcaggtagagttgtatttcgaagcatctccgcaatgggcaatcgaccaacctcaccaggagtctgttgctgacaattttactgatggtgatttgttattccttcgtaccggaagccgcaatcaggggattctgaagaagaaaggtgatgatgttcgtatcgactggggacatttctatctggcagctgaaaagaaaaacagcacatctgcaatcggtgacggcagagaactgcgtaagagctttcttgataataagttaggagcttctaccacaaacggttatgataaactggctttggtacgttcattgggcgaaacacaaaaagctgatggccatctgctgatcggatatgatgatatttattctatccaatactttggtgataacctgcgtccttactggaaccgtgagggcaatgaaacgattgtttcccaattccagaaagcggagaaagaatacaagacacaaatgaagaacagcgctgctttcgacaagaaactgatggaagaagctactgctgccggtggacgtaaatatgctgaactttgtgcattggcttatcgtcaggcattggctgcacataaactggtacaggctccgaacggtgacttggtgttcctttctaaggagaacttcagtaatggttccatcggaacagtcgacctgacttatccgggagctccgctgcttttatattacaatccggaattggtgaaagctaccatgaaccatatcttctattatagcgaaagcggaaaatgggcgaaaccatttgctgcacatgatgtcggtacttatccattggctaacggccagacttatggcggtgatatgccggtagaagaatcgggtaatatggtagtgttggctgctgccattgcaaaggtagaaggtaatgcagattacgcacaaaaacattgggaaactctgactacatggacagactatctggtagagtacggacttgatccggccaaccaactttgtaccgatgactttgcaggacactttgcacacaatgccaacctttctatcaaagcgatcatgggtgttgcttcatacggttatctggcagatatgctgggtaaaaaagacgtggctgaaaagtacacacagaaagcgaaagaaatggctgccgaatgggtgaaaatggctgatgatggtgaccactatcgtctcacatttgacaaaccgggaacatggagccagaagtataacttggtgtgggataaactgttgaatctgcaaatcttccctaaaaatgttgcagaaacggaaatagcttactatctttcgaagcaaaataaatatggtcttccgttggataaccgtgaaacatacacaaagaccgactggatcatgtggacagctacattggcaaatgacaaagctacctttgagaaatttatcgaacccgtatatctgtttatgaacgttacacctaaccgtgttccgatgtccgactgggtatttacagacgaaccgaatcaaagaggcttccaggcacgttccgttgtaggtggatattatatcaaaatgcttgaaggaaaactgattaaataaaacaaaaataccatgaagaaactagctctattcgcttttacgttacttagtgcatgggctatgactgcaaaaacaattaccggaccggtggactatgttagtccgctggttggtacgcagtcaaagcacgcattatctaccggaaatacttaccctgccattgcgctgccctggggaatgaacttttgggttccgcagactggtaaaatgggcgatggatgggcctatacgtatgacgctgacaagatcagaggattcaaacaaacccatcagccaagtccttggatcaatgattacggtcaatttgccatcatgccggtaaccggtaaggcagtatttaatcaggatgagcgtgccagttggttctctcataaagctgaaacggctactccttattattataaagtatatctcgccgatcatgacgtagtgaccgaaattgctccgacagagagagcggctgctttccgtttcactttccccgaaaacgaccactcttatgtagtggtagacgcttttgataaaggttcgtttgtgaaagtaatcccttcggagaacaagattatcggttataccactaaaaacagcggtggtgttcctgccaactttaaaaactactttgtactggtattcgacaaaccgtttacttatacggctgccgtagccagtggtgtgattgacaccaacaaactggaagcgacagacaatcatgccggtgcactgatcggtttcaaaacccgcaagggcgaacaggtaaatgtgcgtgtagcttcctcttttatcagccctgaacaggcggaactgaacctgaaagagctgggtacggacaatgttgaacagattgcagcgaaaggccgcaagatatggaacgatgtactgggacgtatcgaagtgaaagacgatgatatcgaccatttgcgtacattctactcctgcctgtatcgttcggtattgttccccagaagtttctatgagatagatgccaaaggagacgtgatgcactacagtccttataatggcgaagtgcttccgggctatatgtttaccgataccggtttctgggatacgttccgttgtcttttcccattccttaacctgatgtatccatccatgaatacaaagatgcaggaaggattggtgaacacttataaagaaagcggattcctgccggaatgggcgagtccgggacacagaggttgcatggttggaaacaactccgcttccgtagttgccgatgcttacctgaaaggattgaaaggatacgatatcgaaaccttgtgggaagctgtgaaacacggagcgaacgcagtgcatccgaacgttggctctaccggacgattaggacatgagtattataataaattaggatatgtgccttataatgtaggtattaacgagaatgcagcccgtacactggaatatgcatacgatgactggtgtatctatcaattgggtaaagccttgaagaaaccgaaaaaagagattgaaattttcgcaaagcgtgcaatgaattataagaatctctacgatcccgaatacaaactgatgcgtggcaagaatgaagacggtacattccagtctccgtttaatccgttgaagtggggggatgcctttacggaaggtaatagttggcattatacctggtcggtattccatgatcctcaaggtctgatcgacctgatgggtggtaaagacggattcaaccagatgatggattctgtatttatcctgcctccgattttcgatgaaagttattatcgagccgttattcatgaaatccgtgaaatgcagattatgaacatgggcaactatgcacatggcaaccagccgattcagcacatgctttatatgtacaactattccggccaaccctggaaagcgcaacattggattcgtgaagtgatggacaaactttatactcctgctcccgacggttattgcggtgatgaggacaacggccagacttctgcctggtatgtattctcggcaatgggattctatccggtatgtccgggtacggatgaatatgtcttgggtactccctacttcaaggagatgaagctgcatctggaaaacggaaagacggtgactatctccgctccgaataacggagacgataagcgttacatttcatcaatgacattgaacggtaaagaatataccaaaaactatctgactcatcaggatttgttgaatggcgctagcatttctttcaagatggacgcgaaacccaatcagcaacgtggtacaaaagagtccgatttcccttattctttctctaacgaatttaaaaagaagaagtaatcatgaagaaacagatcaaatatatcagcgcaggtatgctggcaggtatgcttctctgtggcggggagctgcaagcctccaaccgtatgacggaaatgcatgtatgtctggcggatgccattcagaaagataaccgcccggaaatatccaatcgtttgttccgttccaatgcggtagagaaggagattctccgtgtacagaaacttttaaagaatgcgaagttggcatggatgtttaccaactgtttcccgaatacactggatacaaccgtacatttccgtaaaggaagcgatggcaaaccggatacgttcgtatatacgggcgatattcacgccatgtggttgcgcgactccggtgcacaggtatggccttacgtacaattggctaattcggatcccgaactgaaagaaatgctggcaggtgttattctccgccagttcaaatgtatcaatatcgatccgtacgcgaatgcttttaatgacggcgctattcctgacggtcattggatgagtgaccttacggacatgaaaccggagttgcacgaacgtaaatgggaaatagactctttgtgttatccgttgcgcttggcctatcattactggaagactaccggagatgcgagcatatttaacgaagaatggattcaggcaatcactaatgtactgaaaacattcaaagagcaacaacgcaaagacggagtaggtccttataaattccaacgtaagacggaacgtgcactggatactgtgagcaatgacggtctgggagcaccggtgaaaccagtcggtttgattgtttccagtttccgtccttcggacgatgctactacgcttcaattcctggttccttccaatttctttgccgtatcttctttgcgtaaggcagccgagattttggagaaggtaaacaagaagacagctttgtccaaagaatgtaagaacctggcgcaggaagtggaaacagcattgaagaaatatgcggtgtataatcatcctaaatatggtaaaatctatgccttcgaggtagatggttttggaaatcatcatctgatggacgatgccaatgtgccgagtttgcttgcgatgccttatttgggtgatgtgaatgtaaacgatccgatttatcagaatacccgccgttttgtatggagtgaggacaatccttacttctttaaaggcaaggcaggcgaaggaatcggcggaccgcatatcggttatgatatggtgtggccgatgagtattatgatgaaagccttcacaagtcagaatgatgccgaaatcaaaacctgtatcaagatgttgatggacaccgatgccggtaccggttttatgcacgaatctttccataaggataatccgaagaattttacccgtgcatggtttgcctggcagaatactcttttcggtgagttgattttgaagttggttaatgaaggaaaggtagatttattgaatagtatacagtaatatgctgacatagtaaattgaacgcggataacgcggatgatgcggttctttttctggtgcaaaatcagaaaaaacgtgttatccgcgtcgtctgcatctaaatatgaatagctgaaaactaatagttaaaaaccaattgtatcatgaaaaagttatgtgtatgggcagttgccgcccttttaatggcagcttgtactccgaaagctgaaaaggctacagattccggtttattgcagagtaaattccagacagaagtagatggaaagaagactgatttgttcactttgcgtaacaagaacaacatggaagtttgtatcacgaacttcggtggacgtattgtttcagtgatggttcccgacaaagacggacagatgcgtgacgttgttctcggtttcgattctattcaggactatatcagcaagccttcggatttcggtgccactatcggacgttatgccaatcgtatcaatcagggacagttcactttggatagtgtagaatatcagcttccccgcaataactacggtcattgtctgcacggcggaccgcaaggattccaataccgggtgtttgatgccgaattgctgaatccgcaggaattgcagttgacttaccgtgcagaagacggtgaagaaggttttccgggaaacatcacttgtaaagtgttgatgaaactgacggacgataatgccatcgatattcaatacgaagcggaaacagacaaaccgacgattgtaaatatgaccaaccactcttattttaatcttgaaggcgatgccggcaacaactccggtcatttgttgatggtggatgcggactattatactccggtggacagtaccttcatgacaactggcgagatcgttccggtagaaggaactccgatggatttccgcaccccgactccggtaggcgaacgtatcaacgactatgatttcgtacagctgaaaaatggcaatggttacgatcacaactgggtattgaacacgaaaggcgacgtaacccgtaaatgcgcttctttgaaatcaccgaagactggtatcgtactcgacgtttatactaatgaaccgggtattcaggtatatgcaggtaatttcctcgatggttcactgacaggaaagaaaggcattacttacaaccaacgtgcttccgtatgtctcgaaacacagaaatatccggatactccgaacaaagcggaatggccgtcggctgtacttcgcccgggcgaaaagtatacaagccaatgtatcttcaaattctctgttgataaataggttataaaggcagttcatgccattgaagaacgggttgtctgattagagattatccgttctttattttaatgtaatttgttagtgctcaattgggttcatagggaaattaggatgatttccggaagtagtagaatagacgaaatgaagaaaaataaaacgaaaggactttttgcatcgatagtgcttggagtggcggttacagcttgtgcgcctgcttcttcttgtggtacggtgacggtagtggaccgaccggacatacagtccgtcaataccaattatatcgggtatcgcgctccgcttcgaccgttgaattttataaagttgccggtaggtagtattcagcccgaaggatgggtgaagaagtatctggagttgcaacgtgacggtctgaccggacatttgggagaaatcagcgcttggctggaaaaggataataatgcctggttgacaactggtggcgatcacggctgggaggaagttccttactggctcaaagggtatggcaatctagcatatatcctgaatgacccgaagatgattgaagaaaccaaatattggattgaaggtgtatttgccagtcgccagccggatggctatttcggtccggtcaatgaacgtaacggcaaacgcgaactttgggcacagatgattatgctctggtgtctgcaatcttattatgagtattctcaagatcagcgtgtcattgacctgatgacgaattacttcaagtggcagatgactgttcccgatgaccaacttctggaagattattgggagaaaagccgtggcggtgataacatcatcagtatctactggctttacaaccatactggggatgctttcctactcgaattagccgagaagattcaccgtaacacagccgactggacgaaatccacctccttacctaactggcacaatgtaaatatcgcccaatgtttccgtgaacctgccacttattatatgcagaccggagattcagcgatgctgaaagcctcttataatgtccatcatctgatacggcgtacttttggacaggttcccggaggtatgttcggtgcggacgaaaatgctcgtctgggatatatcgatccccgacagggagtggaaacctgcggtttggtagaacaaatggcttccgatgaaatcatgctttgcatgacaggagatcccatgtgggctgaacactgtgaagaagtagcgttcaactcttatccggctgccgtgatgcccgatttcaaggcattgcgttatatcacttgtccgaaccatgccatcagtgattcgaagaaccatcatccgggcattgacaatcgtggcccgttcctttcgatgaatcctttcagcagtcgttgctgccaacataatcatgcacagggctggccttacttcaccgaacatctggtattggcaactcccgacaacggagtggcaacagctatttatgcagcttgcaaagctacagtgaaagtgggtgacggcaaggaaatcactcttcacgaagagacaaattatccttttgaagaaggcattgccttcactgtttctaccgatgaaaaggtcgcttttccattttatcttcgtattccttcatggactcaaaaggtggaagtgcgggtgaatggcaagaaggtaagtgcagctcctgtagcgggaaaatatctttgcatcaatcgcgagtgggcgaatggtgattgtgtggaattgactcttccgatgtctttgtctatgcgtacctggcaggtgaataaaaacagcgtaagcgtagattacggacctttgactttgtctcttaagattgcagagaaatatgtagagaaagacagtcgagaaacagctatcggtgattcaaaatggcagaaaggtgctgattcgaagaaatggcctactactgaaatctatccagatagcccttggaattattcgttggtattggataagaaagaacctttgaagaatttcaaggtaatccgtaaatcttggccggctgacaactatcctttcacagtagccagtgtacctttggaagtaaaagctatcggtcgtccggttcctgaatggaagatagacgaaacaggactgtgtggcgtattgccggaagaagatgcggtgaaaggtgataaagaagaaataacattgatccctatgggtgcggcacggttgagaatctctgcgttcccgaacacaaaagaataaattaataactagaaaacttagaataaatgaaacgtattgtttttttagattacatccgtgtgtttgcatgctttctcgtcatccttgttcatgccagtgaaaatttctactgtgctcccggagccactgatatggcaggtccgcagtcttttttggcaaatgaagtagaccggctatgggtatcagtgtacgacggtttttcacgtatggcagtacccctgttcatgatagtctctgccttcctgcttgcaccgatgaaggaagagcagtctatgtggcaattctatcgccagcgctgtcttcgcatccttccaccgtttttcatattcatgatactgtacagcactctacctatgctgtggggacagatagacggagaaacatctatgaaggacttgtcgcggatattcctgaattttccgacgctagccggacacttgtggtttatgtatcctctgataagcctttatttgtttatcccaattatatccccatggttgagaaaagccacggctaaagaagagcgtttctttatagggctgttcgtgttgtcaacctgtatgccttatctcaatcgttggtgcggtgaagtgtggggacaatgtttctggaatgaataccacatgttgtggtacttctccggttatttgggctatcttgttctggcacattacattcgtgtacatcttacctggaaccgttccaaacgtttcactgtaggaatcattttaatggtaatcggtgctgtatggactatttattcattctatgtgcaggctatacccggcgaactccattccacacctgtaatagaaataggatgggctttctgtacgattaactgtgtgcttctcacaacgggtacattccttatgtttacatgtatcaaacgtccgcaagctcccaagttagtgacggaaacatcgaaacttagctatggtatgtatcttatgcacatattctggctcggactgtgggtgactgtgttcaaagatacattggcgcttcccactgttgccgctataccatgtatcgcagtggttacgtttatctgttgtttggtaacaactaagataatctcgtttataccgggcagtaaatggatagtaggataaatatccggaaacaataagattttgaatagataatcaagtcttttctgattttctattcaaaatcttactgtttatagcctatttccctcttaatgtcctctttctcttttcacctctttcacccctttgtaaactgttatttcccagtctcttacgggtgaatccttcctctgtcagaagctttatgccgctttcatcggtttcaccagatacacatttccatatttggtatgtttgcgggtgacacctgccgcaagcaaaacttgcgcgaacgtagccggattacttccacgcatggcagcggggttatacattttcagtcttctgaatatgtccgaagccgagagccgttcgcttccctcttcatcatctttagctatccggaagcaggcatgaaagacttcctctgccggacacggatgataaaaagcggcgttgtggcgttgcagttcccgttcctcttcttttgtgaaccagtagcggatgccggagagcagttcagctttcagttgggcatagatctgatcgtgcatgataccttcgcagtcgatcaaatgttctgcttcaatgcagatgaatcgccggctaccggtgggatcggtgagcaagtcaaaacggttgcttgtaccgatgaaagaagcgatgcgcggcaagttgcggaaattcttttgataagctttgcagatattcaggtttgccatttgcatcagattcttcaataatggcatttgctgcgttccgtatttgtcaaattcatccatgttcagaagtcccatttcggcaagtaacctttcgggttttccttgtgcagacagtttcaggttgtccatgtaataacgtgacagtgccggcggcatcagtgccttgcaaaatgtggatttttgtcgtccctgctcgctgctgacaagtatgggggctacgctgttggcatgtattcccgtcatgcctaaccattgggcggtgagtcccagcatccaggtatggaagctttttatccagagctgattgtcagagacacgctgcgccaaagcttccagtctgtctgtcccatcccagccgggcagttcctccatgtaaagccggaaaggatggtatttaggaatacaagtggaataaatgtaacggctcaagtctttatcccagcaggatatgccctggtcgtgtgcttccatgcagaaagtgttcagttcccgcttacttacaggttcgaaaggaacggcacgcttgttggcaggacgatattccgtttcttccgtcaataggttgtaacgaaaatcatactgtttttgcaggaatgtacgtacctcttgggttaatcggaccggttgttttcgttctgtctctttctcccttccagtaggcggtgctgtgtccggcaggggaacggtatatttatcttcatgacattttagcgttttctgtggctctttgtctgttttctcaactgcatcttctttgttttccttcatttgaaacaattttagttccttcaatacctgtctccatatcaatgttattgcattcattgttttttctatttttaagtgattaaaatcggtttattgttcagcactgatactgcgaatgtactataggatgataccggtttgcaagtgtttctccggaaaaaatataaatttctacttgactgaagaaggcggcttcttatcgtccttttctctattttttatcgtatctttgacgaagagttattgttgattcactttcgtggtttaatcaaatgacaaaagtgatctacttggataacaactgtgatttaaatgaaccacggtagtggtttgatgataaacttaaagtttttacatgaaatatattcactatcaaaacgttaactactaatggctatactttacgattggtatgagaatcccggtgagtccgatgattcggaagagaaaggtttgcatccccgcatttttttgaatggtaaggtgggaacggataaactgtgccggatgattcacggacgcagttcgctttctgtaggtgatgtaaaaaatgcgttcgagatgcttgcccaaatttgtggtgaagaactacgtgaaggacgcgaggtacatatcgaggggctaggctattttgcccctattttgaggagcacgcaaaaggtgacccgcagtactaaaaacaaatggtcgaagatggaactgaaaacaatcggtttccgtccggatgctcgcctgcggggtgaattggtaggtgccaaagccagccggagtaagtatgcgcgccattcggagtctttgtcggaggtggagatagatatgcggctgaaggaatatttcgccgatcatgacgtaatgcttcgttatgattttcaggaagtatgctgcatgacacggactacggcgaatcgtcatctccggcgattgctggaagaaggtaaattgcgaaatatcggcaaacgtatgcagccgatttatgtggctgcagcgggttattacggggtatctcgtgatgtgctccggcggtaaatggaaacgatttgagtaagcgtcgatttgaagtgtgtcggtgaaaatggtgaaagcgtgatagaagggcttttgcatggtcgctttcacccgctttcctgctctggatggaggtttcgggaagaaggtgaaagtggtgaaagatgtagtcttatagatgatttactttcattatttgattgaatagtaaggcttttttagttatctgttaaattgataatatatctgcttagaggggattatttaatagcatcgaacttcagtgtcccgtttacgtcgataattttcaaagtacggttaccctttattcccatatcaatgaaattgaccttgtataaaccatttcccaatgcagttactgatgttactttagatatgtcgcttggtccgtcttgcatacctgttcggaagttccatatcgcatatccttcgctgtcatactcgtagttatctttcagctgcttttgcaatttggctgtacaatgcttttttactgccggaacataattctttgctccaaaaacgtagtttgcgtagaaatctttgatgaactgaatggttttggtattgtccactttaggtgattgtagaataatggcagtcccattggcgagaacagcctcattgtcgagacaacaagcttgaatttgtatgggttgtagggcaaatcctagatgaatgatatataaaaataaaatctttttcatattcgtatattatgtattttgaaagtcttatttagatttagcgacctattgcaaagatagcgttaattacgaaaaatgaacgaagtatgtgagaaaaagataataatatcatatcaaaagatgaaatgaattgtccaaagccattttgataagagaggggaatgaatgttataattagcgatgaataggggatatttcgtttatctatacattgcagggcagccggatagtagcctcattgattgtactattctattaaatgatatagatttaatgtgtatctttgtaaaaaatgcaaaataaaacatggaatcaaaataaatgaaattagataattatgaaaaacattttccttcctaaagtaacgatgtgtataattgcactgtttactttaattttaccagcttctgcacaaaatacaaatgcgacagatgagtacaaagaaacgttgaagaaaatcatggatttttctggtacttcgactactacggatgactttctccagagattatcatctataatgaaattgaatgcgccgaaaaaggatgaggcttattggaatgagttctctaaaaactggaaagagaaagtagagaataaggtgtttgaaatgtatatgcctgtttatgagaagcatttaacattggaagaattaaaagctgttgctgcattttatgaatctcccgtaggtaaaaaatataaagaggcttcattgattgttatgcgtgagacaacgccgttgttagtgcagcaactccatacagagatgtccaaagaggtaatgccggagaaaagtgaacgagtaaaaagaggtgaacagcggttgaaagaatatgagcaaaagcagaagcgtgataaagaattatatgcacaagcctatatgcttccaagcgatagtatagttatagttcctgaagaagtgtatgagaaagcgtatgaaaatgggatgtctacaagtccttctttatattcgattgaaaggagaaagaatgatactaaagtgacattcatacaacctatttattgggattggcaatggttgtattatagtccgggatttaagattatcgataagaaaagtggcgatgagtataatgtgcggggatatgatggtggagctccgatagggaggctgttggctgtcaaaggatttaatcataaatatatttatatcagtcttttattcccgaaactgaagaagagtgtgaaagaaatagatattcttgagttgccacacaaaaaagataaagaacagttgccttctaatgatgatggaaagtctaaatcatattttaatataaaggtgaaagattatcagaccatttccgataagaaaaataagaagatctattattagtttaaatgattatcagaatttgaaatgataatagcaggtattgaacatgagtgtttactgtttttgatataaatttattctatatgagaaatcgaattatgattttatgcactttttgtgctattgctatattttcttctgcccaagagaaattctctatccaaggtattgctaatgaggaattgaataatcagttgttgtatttgtgtctgatggatgatggagaaaaagccaaagaagtcgttctcgacagtgcaaaagtgaaaaagggaaagttctctttttctggtgtacgtcagacaccgaatattgcacttattaaggatagggatggagaaacttatccgttgattctcgaaaaaggaaagattgtgatcaatcttaccacgaggaccgtaggaggtacgccgctgaatgatactttggatgtggcttggaaaggaatgcagtcggtgataaataataacaaacaaatagtgaaaagtaatatttcacttgtcatgagccaaaaatccggagagagttttagagaagcactgaaacgggatactgcatttgctgcaatatggcggagaaatgtggagatagatttggcacagagggattcgattcgcgcttttgtagaagaacaccaaaacagtttggtgggagtatttctgttatctttaaaagaagtgtctatatatcacagtctattggaagatatgatgagcgaggcttcttctgtgtttgcgcagcatgtattggtgaaagataaattagaaaaaatgaggcaaatggcccggcgttttgaggccgagcgtgaaaagaaaatgactccggaggagcgtgaagaacaaaagaaacggcaggcaatggacgctaagataaagattggcgaacgttttccgaacgctaaggtgaaagacaatgctggagagataaaacagttgtccgactatgtaggtaaggggaagtatgtgttaatagacttttgggcttcatggtgcggtccgtgccggaatgaaatgcccaatgtgaaagctgcttatgagaaatatgcttctaagggatttgaggtgattagtatctctatagataagaaacagaaagcttggaggactgctattgaagaactcggaatgaactggacacaagtattgaatgtggatgctgctgatgtatatggtatttatgcaatacccaaaacttttcttgtagatccggagggcattgttgttgcaaaagatttaagaagtaagaagctggaaaagacattgtttaatctgttggaatgattgttgtattatagtatcgtgatttgctaatctggatgaatttgttcgtattggtggacaattcatacctgccgtgacagttatatcggatttcttacagcaagtatgaatagctatggcttaaatcagaagcccgtccaatagctctaaataaagtccaatagcttcttctatttcttttaacatgatatattcttctgccgtgtgtgagcgtgacgaacggcccggacctattttcactgatggaaaggacattagtgcctggtcggacaatgttggagaaccaaaaggaacgcgtcctagcttcacagctttttgaacaaacggatgtttctcgtcgattcgtgaagaattgagacggaatgaacgagcttgggcttcacaggaaatatgctttttgatttcagcaaacaattcttcatttgagtaaagctcgttactccggacatcgacgatgaaagtacatttatcgggaatcacattgtgttgtgtaccggcattgataacagtgacactcatcttcacgggacccaacaagggtgattctttctcaaaacgatagtcacggaaccaagctatgtcgtctaacaccttgtaaattgcattgtctccttcgttacgtgctgcgtggcctgctttacctgttgcggtcacatctagtaccattaatcccttctcggcaatggcaggttgcatttctgtaggttctcctacgatagcgaatgagactggaggaagtcccggcaatacactttcaattccgttttttcctgagacttcttcttcacaagaggctagataaatcagattgtatttttgcgaagtacgacatagttgcaggaacacctgtaataacgaaacaacgctggcaccggcatcgttacttcctaatccatataacttaccgttttcttcacgtggagtgaacggatctttccgccaaccgttaaccggtttcactgtgtctatgtgggagttaagtaaaatagtcggcttcttcagatcaaacatcggactaaagcaccacacattatttcctttacgtcccgtctgcatacctgccatttcaatatagttttgcaggaaatccgcagcctgggtttcttcccgactgattgaaggaatactaatcagtgatttaagcaggcttacagcctctgttgtcatatacggaatatcatatttcatagtgcaaatcttttatctataccttaatctttgcacaaagatagtcgttttgcacagttgtttcaaataaaaataatgaattaattcttatctattgattattagttgcttaggtccggaaaactattgaaatctttctttttttgattcttttcttatgaaaaaggttgttgataaattatttaataattaactttgttgaagggttttatattttacttgttaatcttaatggatatacatgatgattatcacacgaatggaagataaagttcttcgttttaaaaagttttttgatctgaatttccccaaagtaaaaactttcgcatggcaattgttaaaatcagaagaagatgcagaagatatagctcaagatatatttgttaagctatgggagaaaccggatttatggttagaacgtgaaaaattggatagttatttatatacagttgtacgaaaccatatctataattttttgaagcataaggctgttgaatatgactacttggatgttgcagcagaaaaaatgcgaatggcggaactgggattgcctacgccggatgatgaattttgtgctcatgaacttgagctttttgttcagatggctcttgaacgcatgccggaacagcgcaggcgtgtttttttaatgagcagagaggaagggatgacttcaccggaaattgctgagaagttgaatgtttcggttcgtacagttgagcaacatatctataaagcccttcaagatctaaaaaaaatcattttatttttattttttttctatttagactaagtatgtatgtctggcaagttgtctcttatatgtaacacttgatttggtatagatgaaaagtaaattggaaaaacagctacgctcttttattgactttgattattcaaagcggacaatcgacagatttcatcgttggatgattagtcctgattctgcagaagagaaagaaatggcgcttcataatttatggtttaagacgaaaggaaagtttggacacggtatggagcattcgtttcagcaggtattggataaaatcggcattgaatatactccaatggttacaaatgtaaatcgttggaagttgtggaaatctgttgcggcagctgctgttatcgtcattctgtctgtgacaactactttgtgggtaagttataatcattttgacagggacaatatcgcaatggtggaacattatgtgaataatggggccagagagacaatcagtcttccggacggaactaccgtatgtctgaattctggttcatatgtattttatcctgaaaatctggagggcaagacccgaacggtttatctgatgggagaagccgaatttaaagtggcaaaaaatccggagaaacctttcattgtgcgatcatcaaatatggcaataactgccttgggaacagagtttaatgtgaaagcttatccggaagaagatataataaccacttctttgatcgaagggaaagtacgagtggactgtaatgatacgattagttatgttttaactcccggatatcaggttgtgtataataaatgtacagctgactgccaagtgctgactgccaacatgaaagatgtaacggcatggcaacgaggggaaattgtatttaataaagccacaattgctgaaattatacagacattggagcgtcattttggaattatgttttatgtttctacgaagaaacgtaatcaggatcgctacaactttgtgtttaaagaaaatgcagggctggaagaagttttggaagtgatgcaagtggttgtcggccaatttgattatcgtttgaaagacaatgcctgccatataatttggtaatgaatatttttcttattatttaacgctcaatttactccgcctatgtagaaaaatatccggagaaggccccacctactccggatatgaaataagtttagtattaaaatggtgtaaaaaatagtttactacctttgtttgacttgagaaaatattatgattttaacactaaaacgctgctaagatatgaatttatatctgaaaaacattagaaaaagtatattaataatttgtctgctattagtagggtcagcgatttatgctcagaatagtagtaaaataacaataaaaagaaaaaatatttcactacaggaagcattggctgaagtcaggaagttaacccacatgtctatttcttataatgattctcaacttcctgtgaatagaatatctttagatattgaaaaacaacctttggagcaagctttgaaagtaattcttaaaggaacaggttttacatatttgataaaagataattatataatgattgtgccggaacaaaatatcaaaaaggctaaaagcagaaatatatccggcaatgttgtagatgcgaaaggagaaccgttaatcggagttacagtgattgaaaaaggaacaactaacggtgcggtgaccgatttggatggcaattataaaataacaactaagactgcaacgcctgttcttgttttttcatacgtaggttatcagacaaaagagactcatgctacagaaaatattgtcaatattgttttggaggatggagctcaggaactgggggaagtggtcgttacggctttaggaattaagcgttcagagaaagcattaagttataatgttcagaaagtgggcaatgatgctgtcactactgtgaagagtgccaatttcatgaattcattgtccggtaaggttgcaggagtgaatatcaatgcttcctcagctggtatgggcggcgctgcccgtgtggtgatgcgtggtccgaagtctatcagccaaagtaatcaggctctttatgttattgatggtattcctgtgactggtagaagccagggagaattgaagggggatgcaatgatgtatgcgaatcagccggggacagaaagtattgcggatgtcaatccggaagatatcgagtctatttcggtgcttagcggaccggctgctgccgctctttacggttcggctgctgctcagggagtggttatgattactactaagaaggggcaagaaggaaaagtgtccgtcacgatttctaatagttcacagtttgccaatccatttgtaatgccaaagtttcaggaccaatatgtgaatcgtccgggggagataaaaacttggggagataaagctacttcggaattcggtacttatgaaccggctgatttctttaatacgggtactaatattcaaaacaatatttcactgacagcaggtactagcaagaatcagacatatctttctgtgggtacgacgaatgcacaagggattattcctaataactcatatgatcggtataattttacgtttcgtaataccacctcattcttgaatgataagatgacttgtgattttaactttaattatattcgtgagaaagataaaaatctgatggctcaaggtcagtggtttaaccctttgacttctctttatcttttcccgaggggagaaagttttgatgcaatccgtacatttgaggtatatgatcctgttcgtaagatatatgtgcaaaattggaactatggagatgctcttaagatgcagaatccttattgggtggcaaaccgtatgaatcgcactaatgaccggaatcgttatatggtgagtgccagcctgaaatatgaaatattagactggctgaatgttaccgggcgtttgcgctgggatgatgctgccactaagcaggaagataaacggtatgcctctacattaaagttgtttgcaccttccgattacggtttttatggctatgataagattaatgatcagacattgtatggagacttgatgcttaatatcaataagacattaggggagaattttagcatttcttctaatatgggtgcttcattttcccgtttgaaatatgatgttaccggttttcagggaggtctgaaagctccttctaatgtgtttacaccgaatgctatagattatggaaacgcaaccaatgacaatcgtcctatttttgagagctacaaacattatatcaattcaatgtttatcagtgccgagttggggtatagaagtatgctttacttgactctgaccggtcgtaatgattgggactcagctttgcatggaaccgcacaaacatcattcttctatccttctgtaggggtatctgcggttatttcggaaatggcgaagatgccacaaatgattaattatttgaaagtacgtgcttcgtgggcgtctgtcggttcggctattgagcctaatctgtcatcggcatggaggtatgaatataatcccgctttgggaacttataaaacagtaacttacaaatttccgaagaaattttatccggaacgtacggattcatgggaggcaggtgtcactgcacgcttgtttggaaatgctttgtctgttgacttgactgtttaccaatccaatacacgcaaacagacattgttgcgggatgttacgtctggagctgcaggttttaataaggaatatattcaaacaggtaatatcaggaatcgtggattggaattatcggtgggatatactaaatcctgggcggattttacatggagctcttcattggcttacagtatgaaccgtaacaaaatagtagaactgttggagaatcctaacgaggtggtaaggcaggcaggacttagtggttgcggagtagtcctgaaaaaaggtggcggtatgggcgatatttatacatatactgactttaagcgtgatgctgaggggaatatcgctcttgattccaacgggaatgtgatgcagaccaacttgtccaatccacaataccggggttcggtattgcctaaaggcaatcttggtttttcaaatgatttttcatggaaaggtgtgaatctgggatttgtcctgactgcgcgcctgggaggtatatgtatgtcacagacacaggctattctggatgagtatggcgtttcagcggtgagtgctgaagcacgaaataatggtggtatagcagtaaataccggaaaaatctcagccgaaggatattatgcggtagtaggtggagacaaccctatatggtccgaatatatttacagtgcgaccaatgtacgtttacaggaagctcatattagctatactttacctagaaaatggttgaagagtaaagaactgaccttgggagtgactgccaataatctgtttatgatatacaggaaggctccgtttgatccggaatcaactgcgtcaacagggacttattatcaagggtttgattattttatgcaaccaagtttgcgtaccctgggattcaacatcaaattgaaactttgatattaacttaaaaaaaagaaagatgatgaagaaaataaatatagtgagaagttggttgatcggttcatttgttctattcgggattacctcttgtactgcggggtttgaggatgctaaccgtccgggacatgagacttcgttggaagagcttggacgagacgactatgcggtttcctcttttatcacagagttgcagaactttgcttttcctgaacaggagaatacttatcaaaatacggaagatcttattggtaattatttggggcgttacatgacttatgtgaagccggatttttcggtgaagaattatacttgttttaatgcatcggacgattggaaaatcgtaccgtggcgggatgtgtttgccaaagcgacgtcttcatttaatgctgtggctgtcctcacacaagaagagggccccatgtatgcattggcattaattttacgtgcgcagttaatgttgcgttttactgatacatacggtcctcttcctattggggtggaagaagatgccaatgcttattcttctcaagagaaagtgtatagccatctcatagagactctggataaagcaatttccatcataactcctttggtggagacgaatccgggattggttttgaaagcggatgcggataaggtgtatggaggtaaaatgaatcaatggtgtaaatttgcaaactcgttgaagttgcgtatggccatccgcatgcgatttgtcaatcaggatgaagctcagcgaattgctgtggaagcgtataaagcgggagttattgaacagaacgaggacaattgcgctataacatatattcccaatggacagtataagacttctgtcgactggggagacagtcgtgcctgtgccgatttggaaagttatatgaatggttttggcgacccgcgtatttatcagtattttaaaaatacggaagaatatggtagacgttcggttgtgggttgccgtgcaggtgccaacgtgaccaataaggaccttgctatgaaaaaatattctgctgccaatattgaggaagactcaaggggaatgtggatgacggctgccgagatgacattttgccgggctgaaggtgcgatgttaggttgggatatgggaggaactcccggtgcgctttataatcaggcggttcgtttgtcgtttgaacaatggggggtggccggccaggaatattactacttggaaaattcggaaaacacacaagagtattattatgatgctgcggatggatatggaggcaatcatgcacctgtcagtacaatcacggtgaagtgggatgataatgattcccccgaaagaaaaatggaaaggctgattgtacagaaatggattgctttgtttcctgatggtcaggaaggatggaatgaaatacgtcgtaccggttatccttgcgtatttcctgtggctcagtccaccaatggatacgatctggatgtgccgaatcgtattccgtttgatccgagagagatgaatggcaataatcaggaaaattatcggaaagctgttgaaatgttaggcgggaaagatgattatgctgcaaggatgtggtggcaaaatggcggtaacaagtaagaaatctaaatgtaaaaaactataaaaatgaaacgattatataaatatttctttggaattttaggaatatcatttgctttgacggcctgtgatgattggttggatacggaaattaaagatcctgcgaatctgactatatctaataaggatgaggcttattatgcccgtctgcgtgaatataaaaagagtgaccatccggttgcgttcggatggtatggtaactggacgggaaccggtgcttcttatgagaattccttaaaaggattgccggatagtgtagattttgtgtcattgtggggaaactggaagaatccgtcacctgctatgatggaagatttacgttatgtgcaagaaaaaaagggaacgaaggtattgttctgtttcttggtgcttgatattggcgaccagattacaccgccgatgccacaggaggaaataaacaatggtacatctatagaagactggagacataagttctgggggtgggactattcactggagaatcggttggttgcagtggagaaatatgcgaacgccttgtgtgatacgatcgaaaagtataattatgatgggttcgatttcgatgctgaaccgaatgtacagcatccgtttcctaccaataaggaactttggcaaaataacggtcaagtaatcgcgaagtttgtggaaacgatgtcgaagagagtcggcccgaagtctggtacgggaaaaatgctggttgtggatggtgaaccggatgcactgcctgctgagctgtttcaccattttgattatctgattctgcaaacgtatacaacttattataagcaagacaacagtcggctggatgctcgcttcgacaaacagtatgcccactttaaagatgtggcgacagctggagagattgcgaaaaagattattatctgtgagaattttgaggatcatgccaagactggtggggcggcttttatacttcctgacggcacggagataaattcacttagtggttttgcttattggaatccgtcggttggtggcatacaatatcgcaaaggcggtgtaggaacttaccatatggaatatgagtataaagtgaatgcacaagggagcgaaacttatccggcgttgcgtaaagccatacaaattcagaatccaagtattaagtaaataaaaacgaataaaaaatgaacagatatttattaaaacaaaatataatcggactattattctttacatgtctgtttgtcggttgtgataatgccgaatattcggtgttacataatcaggcctatatttcacaaactggtacgaatccgaatactgcattaaaagtgtttattgatcaagatttggtgacagccaatttgaatgtgcgtctttccgatccggcagagaaagactataactttgagtttgtggaagatgctgaattattggcaaagtataatgaagttaattatacatcctataaatttcttcctgccgaacagtataattttaaggggaaagaggctgtgataaagcagggggaggttctttcggaatcgtcagggttggaaattcttcccttgacgcaggaaatgaaagatagcggaaataaatacgccattgctttgacacttcagagtaaagatggtacaacagaggtcttgaaacccggaagtactatactttatttgcttgacccggccattgtgacttcagtcccggttttcaactctagacataatgttgctttcagtttgattgaagatttatctttaagcgaatggactttagagttctgtgtcaatatgagcaaacttgggaagaaggttggggaattgaataatcaggccctttttgatggttcaagcagtttgggcgaatcggacgggcagatttatactcgttttggtgatgcccccattgaaggaaaccgtttgcagataaagacgcaaggcttacagatgaacagtgcaacgttgtttgaagaggataaatggtatcagatagcttgggtatgtacaagcagcaagttgtatctgtatgttgacggaaaattggataattcgatagatgtaccgggtaaagtgacgaatctcagtaaaacgaaatgtaaaatcggaaataccgaatatttgaaagcagatgttcagatgagtgaattccgcttatggaagcgggctttatctcagcgggaaatagccaacaacttgtatgcgaccgatcctcactccaatgccttgtttgcttattttaaattcaatgaagggaaaggtgacaggtttaccgatgctacaggaaatggaaatgaggcatggtgtattgatcctgttgaatggagagataatgttcgcctcaatgctaacaattaaataatgtattataattgaaatatcatgaaatcaataaagaagaatattataacttcgatggtattgcttttgccattgtggtttgttgcatgtgaaagtgaacgggaagtgggaagcactctttttccggaagaaaacagtggtgacattgtcaaagcatttattgacaaccgttgtttttatcccaagaattatatggaatctacagttgtgcagacaggaaacggaggagatttgattgcgggttccgaacaggtggatctccgggtgcaactgaccaatgctgctccccaggatttggttttttcgatgaaagtggaaaattcggtatcggatgctagagaggatgatgtaacatggttgggagaagacgcaatctcctttctgaatcaaacggttaccatcaaaaagggagaacttgaaagtgaggagatgatatccttcacgcttgatgaggaatctggctcacttaaggaacttgctgagagtggaatggtagctttgtctttggtaactactgatgcagttgagataagtgaaaattatagtacatatttatggaaagtgaataaggaaatcacgaatatagatgtgaatggcagtttgaaagataaaacaatgattgatgttacttcttatgatgtgattggaggatatggagttcctacacaagatttaagtgatgataacatgaacacgttcctaatgagttatattggctatccaaatgctaaaataccatttcatatgcatgagcctcaggaaattatagggctttcaattactcctgctggttattggggagcatggaatttggattattcaaaagtggaattattaggtggggatgagccggataatttgacgcgcataggtatagcgacatgtacaacaggaatgccttctgatcatactccttgggaaatagctttttattcgcccataaaagtgcgatatctgacagtgcatgtactggataatttctctaatggtgggtctataaatgcattatgtgctgaaatacggttgtatcgataggagttagggaatatgattatttttcctaatttgcagtagaatgtaatttatactatgccggtaaagatgaagtaggctttgctggcatagtttggtttataaccgtttggtttttattgccaaatgtctgattcataatgttgcgttgcaaaactcttggattaatgttgcctaaatgaagtaaaaccaatacctttgtaccatatttactaatacaaagagtatgacttatcatcatttatctgtcctggtccatcgtcaagccgaaaaatatggcgacaaggtagccttaaaataccgtgactatgagacagctcaatggattcctatttcatggaagcagttctccagaacagtacggcaagcagctaatgctttcgtggcattgggagtggaagaacaagagaatatcggtatattttcacaaaataaacccgaatggttctatgtcgactttggcgcgtttgccaatcgggctgttactattccgttttatgcaacgagttcacctgcgcaggcgcaatatatcattaatgatgcgcagattcgtttcctttttgtaggcgagcaataccagtatgatgctgctttcagcatctttggtttctgcacctctctgcaacaactgattatttttgaccgttcggtagtgaaagatccccgcgacgtatcgtctatctattttgatgagtttatggcgatgggagagggattgcctcacaatgatacggtagaagaacgtaccgaacgggcttcatacgatgacttggcaaacattctctatacatccggcacaacgggtgaaccgaagggcgtcatgcttcatcattcctgttatctggaacagtttcatacacacgatgaccgtttgacgaccatgtcggataaggatgtatctatgaacttcctccccttgacacacgtgtttgagaaagcatggtgttatctctgtattcataaaggagtgcagatttgtatcaatctccgtccggcggatattcagacaacgattaaggaaattcgtccgacactgatgtgtagtgttccccgtttctgggagaaagtatatgcaggtgtacaggagaaaattaacgaaacaacagggttgaagaaagcactgatgctggatgctatccgggtaggtagaatccataatctggattatctgcgtttgggtaagactcctccggtgatgaatcaactgaaatataaattctacgaaaagacaatctactctctactgaaaaaaacaatcggtattgagaacggtaactttttcccgactgccggtgctgccgtccccgatgaaatcaatgaatttgtccattcggtaggaatcaatatggtggtaggatatggcttgacggaatcgacggccactgtatcttgtacattgccggttggctatgatatcggttcagtaggtgttgtacttccgggaattgaagtgaaaatcggtgaagacaatgaaattcttcttcggggcaagacgattaccaaaggttattataagaaagcagaagctacggctgctgccattgaacccgatggctggttccatacaggtgatgccggttactttaaaaatggccagcttttcctgacggaacgcattaaagacctattcaaaacatcgaacggcaaatatgttgctccgcaagctttggaaacgaaattggttattgaccgttatattgaccagattgccattattgccgatcagcgtaagtttgtttccgctctgattgttcctgtatatgggtttgtgaaagagtatgcggaagaaaaaggcattaaatacaaagatatggaggaactgttgaaacatccgaagattgtaggattgtttcgtgcacggattgatacactccaacagcagtttgcacactatgagcaaatcaaacgtttcactctgcttcccgaaccgttcagtatggaacgtggagaactgactaatacgttgaaattgaaacggtcggtagttgccaagaattatagtgagcagattgaaaagatgtacgaagaaaatgagaaataagcgatggacggtgaacgttaaatatgaaacggtaaaccgtaaacgataagttgcaaacaataaaacggtgaacaaaatctgtgcaattggcagagttgttcaccgtttattatttataagtacatctccctaattagtttgtattgttttcatttttacaaattccttataaagaaaaacttcttgattttgatagtataaacttatttagaagacatacttagtttattcgttcctttttagtatccgaaaatctgctcctgtgtcaattcttcaataagacctacagctttcagcttatccagttccaaatccttcttatctcccagaatgtaataaacatacgtgcgtccttttacccattgcttttggaaatcggcaatgtctttcagcgtcatgttctgtatatcattgtagagcttgatacgcgggtctacgttttggcctaggtcctgtgcattgatataactccagatgatgtcacctttgatgatacgttcggtacgcaggcggttcgttaatccgtctttagccagtttgaatgcagcctccgattccggcatattctcattcagtccggagagtacgacatacgtacgttcgttgcccggagatacgtagaaagtacaagccaagcgatagaattcacttttcagtttctccggtgtcatgtccgaagtacccagatattatatcaggaagagtgacaagcaagaaagtttcaatagtttgttcataatatgacaacattttaataacaaaaacaaaggtagcagatttttgcttatctttgtcccccgatatctgaattttgtaaataataaaattgtaaatcaaatgattactattgaacaacttaaagacgtgaaagagcgcactgatgcgctgaggaggtatctttgacatcgacgggaagaaaattcaagtcgaagaagagcaattaagaacacaagctccgggattttgggatgaccagaagaaggccgaagctcaaatgaaattggtgaaagacctgcaaaagtggattgaaggctacaacgaactcaagacattggcagatgaacttgaactggcatttgatttctataaagaagaactggtgaccgaggaagatgtggacgctgcttacgccaaagctagtgaagcggtagaggcactcgaactcaaaaatatgcttcgtgacgaagccgaccagatggattgtgtgttgaaaatcaattcaggtgccggtggtacggaaagtcaggactgggcttctatgctgatgcgtatgtatctgcgttatgccgagaccaacggttataaagctaccattgccaaccttcaggaaggtgacgaagccggaatcaaaacctgtactatcaatattgaaggtgattttgcatacggttatttgaagggagagaacggtgtgcaccgcctggttcgtgtttctccgtacaatgcgcaaggtaaacgtatgacttcctttgcttctgtattcgttactccgctggtggatgacagtatcgaggtaaatattttgcctgccaacatctcttgggatacattccgaagcggtggtgccggtggacagaatgtaaataaggtagaatccggtgtccgtttgcgttatcagtataaagatccttataccggtgaggaagaagaaattctgattgaaaataccgaaacccgtgaccagccgaagaaccgtgagaatgcaatgcgtcaactacgttccatcttgtatgataaggaattgcagcatcgtatggcagaacaggcgaaagtggaagccggtaagaagaagatcgagtggggttcccagatccgtagctacgtatttgatgaccgtcgcgtgaaagatcatcgtaccaactatcagacttcggatgtgaacggtgtgatggatggcaaaatagatggctttatcaaagcttatctgatggagttttcttcacaagaatcataaaaaataaaattagcaagaattatttttggaaagttaatagatttgtacttactttgttagcgttgaactttaaagctaactattatgggtaaggtgaagaaaaaagtagcaattagtaagaaagaagaagaacaagcccagaaggttgtcaaaatagtgttcgtctcattaattattttggcattgattatgctgatcgcattttcctttttcggctgataagttcgccacaaattatacggttaacccagattgtttggttattgataggatgaatatcaaatccgatctgtgttaatctgcgtaatttgtggcgaactctttgttttgtaatgcatttgtgttctctgtaatataaatgtaacttttctgtcattttcccgtagttaatttgtcatctccgtgtatcctcacagttgtacttttgccgtgaatttagtagcagacaactgaaatgagtagaatcagaacaaccgtcgttatgcttttgctggcgacaatggcctttggacaggcaaaagaagatgcaggggatggtaagatgctggataaacagaccatggagtttaaggattatctgccggagattcacggaacaatccggggaaagtacgaataccagacagaaacaagtgaaagccgttttgaagtacgtaatgcacgcttcagtgtttcgggaaatgtgcatccgatagttgcttataaagcggaaatcgacctttccgatgaaggctctatcaagatgcttgatgcgtatgcacgtgtttttccggtgaaagacctgaattttacgatcggtcagatgcgcgttcctttcacgatagatgctcaccgctcaccacatcagcagtattttgccaaccgttcattcattgccaagcaagtaggaaatgtgcgtgatgtcggtttgacggctggttatacgaataaagacggtttcccatttattcttgaagggggattgtttaacggctccggtctgacaaatcagaaagaatggcataaaacgctgaattactccataaaagcgcagttactgcctaataagaactggaatctgacacttagcacccaaatgataaaaccggaaaatgtgcggattaatatgtacgatgccggtgtctattatcagaatgaccgttttcatattgaggcggaatatttatataaaatgtacggtcacgaagcatttaaagatgttcatgcggtgaatagttttattaattacgatttaccattaaagaaagtattcaataaaatctccttcctggctcgctatgatatgatgaccgatcatagtgatggtaagatggatgaaacgacaaaagctttgattataaatgattatgcccgacatcgtgtgacaggcggaatcacattaagtctttccaaagctttcattgccgacctccgattgaacttcgagaaatatttctataagaactccggcgttccaaaagaatcggaacgggacaaaatcgtgattgagtttatgacgagattctgaaataaattgagacttgaaaattgagaattaagaattgtagttttctgatacatgatgtgagatgtcaaactatcattttttaattctcaattttcaatttttaatttatctttgtgccatggcacaggaaatagaacgtaaatttttagttatcggtgaattcaagtcttcggcttttgcgcaaagtcacattgtgcaggggtatatcagtagtgctcgcgggcgtactgtccgggttcgtattcgggatgataaaggttatctgacaataaagggagcttctaatgcttccggtactagtcgttatgaatgggaaaaggagctggccttatcagaagcagaagaattgatgaggctttgcgaaccggggattattgacaagacccgttatttggtacgtagtggcaaacatgtatttgaagtcgacgagttttatggtgagaatgaaggacttattgtggcagaagtagagctggaatcggaagatgaggcttttgtaaagcccgactttatcggtgaggaggtaacgggcgacatacgctactataactcacagctaatgaaaaaaccgtataaaacgtggtgagcgttaacaaataaaccgtatatttgttcttatataaaaaagagagcagtatatggatatggaacagttgtacagttatgtgccgcgtgaattggttacttttgttttagtaaccttgttttctttattaatcggactttcgcaacgtcgaatcagtctgaagcgtgagggggaaactactcttttcggaaccgaccgcacctttacctttattggtatactgggttacttgctttatatcttagaccctacggatatgcgtctgtttatgggaggtggagcggtattgggattgctgttgggattaaactattatgtaaagcaatcacaatttcatgtttttggtgtaactaccatcattattgccctgattacttattgtatggctcctatcgtagctacccaaccttcctggttttatgtcatggtagttgtgactgtgctcctgctgactgaactcaaacatacttttacagagtttgctcaacggatgaagaatgatgaaatgattacgttagccaagttcttggctatcagcggtatcatattaccgatgcttccgcataagaatctgattccggatattaatcttactccttattctatctggttggcaacggtagtagtatccggcatttcctatctctcttacctattaaagagatatgtattccatgaatccggaacgttagtttctggtattattggtggattatacagcagtacggctacgatctcggtacttgcccgtaaaagccggaaagcctctgaacaggaagcgactgattatgttgctgccatgctgttggctgtcagcatgatgtttctacgatttatgatactgatacttattttcagtagagaaatcttcctgtctatttatccgtatctgttgactatggcggtggtggcggctattgttgcctggtttatccattcccgacaaaaacgaccggaagaccagcctgctgaaacagaagaagatgatagtagcaacccgttggaatttaaagttgctttgatttttgccgtactctttgtgatattcactttcttaactcactatacgttagtgtatgcgggcacaggcggattaaatctcctttcttttgtatccggttttagtgatatcactcctttcatattaaacttgttgcaaaatacaggcagtgtggctgcactgataattactgcttgtagtatgcaggctattattagtaatataatggtaaatatgttctatgctctattctttgcaggaaaggggagtaaacttcgtccttggattttgggaggattcggtgtggtaattacttgtaatctcgttttgttgctgttcttttatatttaagaaaagcgagcaattgatcgtttttcattaatccaattcaagtaatttactattttgtcgaatataatcgataaaatagaggtgtttttatcgactatactcgataaagtgaaatggataaaaaatgaagagtaaatttcattaaaaaggaacttactcttcatttaaattcaaggttgagatatttgttgaatacctttaagtagtggtatgacttgttaccatttccagttgtctttactcttttctacgtctttttctatatcggaaggaagattagggaaaaaatcaatatccgtattagcttctaactcgtctatagtaacctcatatttagaaaagggttctttactattataagatttatgctcaaaccaataccctatggcagaatattttccatctttaagggataacagtgccataaaatagtatttgggaacagctatattatgagaaccatctgatatatattttagtatctggtcatccctaattgttccccctttcactacatataatgtatcttttgaattagtaatgctatagcctttactttgaacttgtctttctaaatttagccaaatacctccgttgaatccatcttgaatttgtggactcatatttgacatgtagaatgtttttttgttggctgctactgaatattgtctgtcttcggaagctattaaatgtcctctactgtagttagaaccagaaaaagctttttctccaagtctgtatgctggaggtaatgaaagatcttctgtaaagttctcatttcttcctgcatctttatcagaagtggcagtgctaaaagtgcatgcgacccaacgagaatgcattttgttacaatcatactcatagctataagtaataatctctttgttattctctttagtggtgtgcgtgataaacttatacatatctccagaacgcaaagctggaatttcaatcctccctgcatatcctgaaggcttttccgggtctggatcaggatctggatttgagccattgcctgctaattgtttgagtgtaaactctgctttttctttccctgctatgattgtaataatgacacttcgttcagctccggtatttgctttcatatatccactgatagagccatttccattgccagatgctctactcaatgtacaccaagtctcactgcttgaagcctgccatgtgccatcagcttttacacggatgataaatccgcctccatttgcattgatttgcgtttggtcaatagaggcaattccttgattggtattgctcggattgtccggaagttcaggcgaatcctgctcactacatgagattgcagtgctacaggctatgaacaggatgaatagtttaaataatgcttttgtcatttcacttctttaattagataaataatagtaggcaagtgatcgctatacccatttagccatacaccacctgcttgcgtccgtttaggataacctttgtatttcccttctttttggaacataaaatcacggcggaagatttcatgtttatagaatttcagtgtactgcggtcagtgcccaacaaattccctgtgaatacgatttgatcgaacaaattccatttgcctttgtacatcagagttccgtatccttttttcaaagtatcccaccaaggattgtacaaatctgtaggtcctacatcagcaggcttacgtttagctccaagtgctacggccatacttttatccatcgggtcgtcattcatatcccccatgataacaattttggctgcggagtcttcccttaacagtgagtctttgatcgctctaacctgctcccctgcgcgttcacgcgccggagaagcagctgctctcgaaggccagtgattgacgataaagtgcattttctcacctgcgatattaccgctggcaatcaggaaaccacgtgtcttatgcaccgtatcattgatatatacataaggtacgagtttactatttgtcagttcaaacaatttgggattatagaagaaagcacagtccacaccacgttggtctgctccttcgtagtgaacatattggtaccctctgtccgctaaagcaggttgtttcagtatgtcctccaatactctgtaattttcgatttcagaaacgccgataatggcgggacccattggtaacttgtcggtacttaacatacttaatatttccgacatgtttttcagcttagccttatacttcatcgtattccactgattagtaccgttaggaagatactcgtagtcattcttaccttcatcatgaatggtgtcaaacaaattctccatattgtagaacgctacactgtagagggcaaatttcttttcttgtccgtaggccatgaggacaaaaagagcgagtacacctaaagtcattaagctttttttcatctttaaaattgattttaaaagtgggtaatttgtcatttgtatgacaaatatctaaaaagaaaacggaaaaaccacccttactagttactttttttgcaaaaaacattgttatatataaaattctttgttattttgcgtaacaacatatttcttttatgttgcaaaatgaaagaccaattaacattaatataaattaaattatgaaacaacgactagggttagcgatcgtgctattttgcttaatgccagcactttttgcgcagcaaaaggcaaagcaaaacgcccgtgaggacaatgcttctttcatgtttacagaatcacaattgaatgaggatgatgatgcagcacagagcacatctgcattggtcacttctaacaatgatgtttatctgtcaaatgtaggttatctgtttagcccaatgagatttcgtgtaaggggatatgattcccagtacagtgacatgtatatcaatggggtacagtttaatgatgcagaaacaggacgtttcagctacggattaataggaggattgaacgatgctacccgtaataaggaagggatcggtccttttgaatttaacaactttacttttggcgcgataggaggtgccaccaatatcaatttacgtgccagccaatatgcggccggctcaaaactaacactgtcaggtagtaaccgcaactacattttgcgtggaatgtatacttattctacaggtctgatgaacaatggttgggcatttaccggatcattgggttatcgctggggtaatgagggaaatattgaaggaatcaaatataattctttttcttacttcctcggtgcggagaaagtattcaacgaacgccatagtctctctttggcaacttggggaacaccgacagagagaggacagcaaatggcggcaaccgaagaagcttattatttagcgaacagtcattattataatccgaactggggatatcagaatggagaaaaacgaaatgcacgtattgtacgtcagttcgaaccatcggctattgcttcatggaatttcaccattgatgataataagaagttagtgacaagtgccggattcaaatattccaactatgggaaaagtgctctaggctggaatggtaatgcggccgatccacgcccggattattataaaaagttgcctagctcaatctttgatgtatgggaatctgttcctactgccgatgaattgcagcagtttaatgaagtcacagataattggaaaaataataaagcttatcgtcagttagattgggatgctctttattttgccaataaacaggcgaatgcattaggtaaagagacactttattatgtagaagaacgtcatgacgatcagttggctttcaaccttagttcggtattcaatcatcaatggaatgaacacaacagctacattgcgggagttgccgtgaatacaaccaaaggtatgcattataaaaaaatgaaggatttgctgggcggacagctttatactgacgtcgacaaatttgcagtgcgcgatcatggagctagttccaatatggtgcaaaatgatcttgataatcctaaccgccgtattggtgaaggtgataaatttggttatgattataacatctatgtgaataagcagagtgcatgggtgcgttatcagggtaacaatggcgggtcattaaactattttgcttccggtaagataggatctacacagatgttccgcgatggattgatgagaaacggacgtgctccgttgaaatcacttggtagcagcggtacggctaaattccttgaaggaggtataaaagccggtttgaattgggctatcaatggtaaccattctttcacgttgaatgccggatatgaagaacgtgcaccgttggcctataactcttttattgctccacgtattaagaatgactttgtgagagacttgaaaacagagcgcatcattggtggtgatttgacttataacttcaacactccatgggtgatgggacgtttgactggttattacactcgcttccagaatcaggtagaaatggatgctttttataatgatagcgaagcacgtttcacttatctttctatgaatggcattgaaaaggaacattggggaatagaagcagcggctacctttaagttgacaagtgaactttcattgacggctatcggtacttggagtgaagctaaatacaccaataatccggatgctgtattgacatatgaaagtgagaatgagtcaaacctcgatcgtgtttatgctaaaggtatgcgtgctaatggtactccgctttctgcttatagccttgctttggattataacgtaaaaggttggttcttcaatttgaccggaaactattatgatcgtgtatatatcgatttctcaagctatcgtcgtcttggcagcgtattggataaaaatggtgccggcgtagatgctaatggaaatccggttctccatgtaccgggtcaggagaaactggatggtggatttatgttggatgcttccatcggaaaatacattcgtttacgcaacggaaagagcattagccttaatttgagtttgactaatatcttgaacaatacagatttgcgtacaggtggtttcgaacaaaaccgtgatgataattacaaagacggtgacgcacgtgtttacaagttttctaagaactctaagtatttctacgcattcccgttcaacgctttcttgaacattggttatagattttaagaatgtgtagttatcaatccaaaacaataagaaaggaagaaacaattatgaagaaattactatctatattatgtaccggattgctgctatgtggcgcaggtctcacttcctgtgagaactatgatgatccggtgacgggaaatgcttatggcaataattcaatcccggaaggacgcaccatttcaatagctgcgctgaaagagaaatacaatgatttcatcgatacgagtactgatacgtatactactattgaggatgaaacacgtattgaaggtgtaataattggagatgatgaaagtggaaacatctacaaacagcttgtcgttggtgatgaaacaggtgctattattgtaggagttaataattccggattatatgccttctgtccggtaggtcaaaaagtcgtaattgactgtaagggattgcaaatcggtagttaccgtaagcttgcacaaatcggttcaatttatgaaggcaaagtgggacgtatgcccgaatatgtatggaaacagcatgtacgtttgattaatgaaccgaagttgttttatgatgaattaagacctttagaaatctctacggctgcagaattgaccgctgtggatatgaagcaggcgccattgcttgttacattaaaaaatgtaagttttccggatgcaaatggtactacaacttatgcagcagaggaagatgtagccaatccaaatctttcttttgtagaacgcaatgtcaactatgctgatggtactaagtctgcggctgtggcacataccagtatctatgctaacttctcaaaagatattcttccgcaaggtactttaaatgtgacaggtatactgacccgatataacaatgcttggcaattgattattcgtactggcagtgatgtaaaacgcaataaataattcaaataacaatatacaattatgaaaaagattctaaatgctttattcttgacactgcttgcagtgttcacatttagttcatgtagtgatgtaccggctccttatgatatattgggagagggtgatgttccggggctgacgggtgatggttctaaagataatccatatactgtatcagatttaaaggctaaggctgatggtactactgtagcttgggtacaagcatatattgtagcaggtattaagtcttctaccgatatgtccataagttctgaaaatgatgttgtttttggaacacaacccacaggtgtgaaagctactgcatttctgattgcagatgaccgtggagaaagcgattataagaattgttcagcggttaatttaagtggtaaaactgctggctgctctgaagttaaggcagctttaaatttggttgataatgcaacaactcctcttcctcgtttagtgactttgaaaggaaccttagtgaaaaatacatggggattaccgggattgaaagaagttacaactgcgatattggaagatggcactattattggtgaagggggagatgagcctacgcctccggttggcggagttacattctttgaagaatcatttgcttcagataaaggtacatttactattgaagataagacacgtcctactaaagtaagcgaaatctggaaatgggagtcttatacaccggagactggcggaactaccagcaaatatatgaaagctagtgcctatatctctgcaacagaaaaagaagcatcagaaagctggttgatatctcctgttgtaaatctgacaaaagcgaccaaagcttcattgacatttgaacatgctcataaattctgtggtgatcctgcaaaagagttgacaatatgggtgaaggaaagtactgcttctgattggactcaagctactataccaacttatggaactaatcaggattggaaatttgtttcttctggtaatattgatcttgctagctatataggtaaaaatattcaatttgcttttaaatatataagtactacttctgctgtaggtacatgggaagtgaagaatgtgaagattgttggagaaggtgaaggtggtggtgaaactcctgaacctcctgttgagggaactgaaatatttactgaaaagtttggtactaagattataggtaaagatgaagcaaaaccagctataagtgcttatcagggttgggataattcaaatttgacttttgcagcaacgagtggagatatacgtgctattgctcataagacccctgaagtttcttcagatgcacctatggtgaatcatgcttggctacccaaaaatagtgaggtaaatttctcaatttctaatataaaagcttcaggttatagtaagttcattgttgcttatgaagtagcggctaatgtgtataatgcaggtgaaactgcagatttgagtgctatcaaagttgttttgaatgacaaggaagtagtggcagcaagtaaggttgtgagcgcagaaaataaagaagctaatattttctattctatgcaagtggaagtagaggttgcaggtactgatgcttctacgttgaagtttgttgctgatgtagctgataacactgtaggtttccggctttataacattagattatatggtgtggaaggaggtactgccccggaaccatcaggtagtgaattattcatctctgaatatgtggaatcatttaaaggaaataataaatatgtagaaatatataatcctacaagcgaatcgatcgatttgtctggttattcattgaaaatgaatacaaatggtaaaaaagaaggtgaagaaatagtatggacatctcttcataataaagcttttactggaactattgaaccgggacatgttgtcgtatttgctaataatcaggctgtaaactacgcaggagaagttgtaaaatgttccgctatggcttttaatggtgatgatgctattggtttatttaaaggagagactttgattgatttgatgggaactccgggagtacaagagaaatttggggagaatgttgtattgagaagagttgctacagttactagtcccaatactacatatactttggctgaatggcacgaagtaaaacttacatcagcggaggatgatgcaagtgttggtatctctggactaggctcccatacggtggagtaaattttggatacatacaaataggagtatttacaaccgattattactcaatattttatagataataagtcagaaatatggttgttatttttaattgcacattctaaaaggtgaagatttaacgcttttattgattattaactcaaaaaggacatcaacttgggtcgtttcttctcttttccttgctattcgtttccgatattccacttttgttttggtctatctcatatgtactgcaaaggtattgatttttgtttgatattgctccttgcttgctccttgtcgtagattaattttcacacaggaatttttgttctctttctataggggcttgaaacaatccatttattggaaacaattaaagacggagctggtttgccccagtgctttttaagaaacagggcaattattttatctccacaaaggctcttgttcccaattatgaggaaagcctaataaacgagttcttactgatgggtatttcgataaaagctgcttgaaatctgcaacaaaagtgttgcccatagaaatggagttaagccaatacaccacatagcagagttgcggataaagtgtttgttcacggaacgagaaatccgtaatccatgtgtttggcatacgcataggcatcattggcttgacaggaaagacccgatttgacagtcttgaatgatgggcgcagcaattacgaagtacgggtctgggtacggattaaaaggctaagtgattatttccagtcatttagcctttttaattatctaatttttccccacattttccccacagctgtctatttatatatttttatatattttagaaacatatttttccgtaaagttatgtacctttgtcggcaaataaagatattctcgtcaaacaaatataaataatataaacatggaaaaaaacagaaaaaaacaaatcgtagttttgagtatagctttagtttgcattttcatcttggtattttcattgttccataaatcagcgacaaaagatagcgcaaatcctcctttaacaaatgttttgactgatagcatttctcaaattgtctcagcttgtcctggcgaaattggtgtggcggttattgttaataacagagatacggttaaggtcaataataagagtgtttatcctatgatgagtgtgtttaaggttcatcaggcattagctctttgtaatgactttgacaataaaggaatttcacttgataccttagtaaatataaatagggataaacttgacccaaagacttggagtcctatgctgaaagattattcagggccagtcatatcattgacagtgagagatttgctgcgttatactcttactcagagtgacaacaatgcaagcaaccttatgtttaaggatatggttaatgtcgctcaaacagatagttttatagccacactcattcctcgttcaagttttcagatagcttatacggaagaggaaatgtcggctgaccataacaaggcttactctaactatacatctcctcttggtgctgcaatgttgatgaatcgtttgtttactgaaggtcttatcgatgatgagaaacaaagtttcattaagaatacgttaaaagaatgcaaaacaggtgtagataggatagcagctccacttcttgataaagaaggggttgttatagcgcataagacaggttcaggtaatgttaatgaaaatggtgttcttgcagctcacaatgatgttgcctatatatgtctgcctaataatatcagttataccttagcggtatttgttaaggatttcaagggaaatgaatcacaagcgtcacaatatgttgcgcatatatcagctgtagtatattctttattaatgcaaacttcagtaaaatcttaaactgcacttgctttgataattaatgataaacaatctaaaagcactctaatcgttatcggagtgcttttagattactaatcaaattgcttctattataatttgaatcctctactttttctttcttcctgttgcggcactcttgctccatatctaagcctgtgccattgctccctgaaccagtcggcaatcggcttcctgtttattgtcaggttcagcctgctttcatcgtcagggtcattttccacccttaaaatatcatcctttatatcaaagttccgcctgtgttgctcggaatagattttaccgctacatttcagggcttcttttttgactataagactttcagtcatttctttagagaatcccagcatggcacaaaacttttccatgcgcagcatttccctgaacatcggaaaccacctgaaagccttgtctatgattctggcgagccgtgacagttctttttctttcatgtcaagttcctgcctgtgcatttctctgagattgtggatttgcgtatcatgctgtttctgcatctgctgtacttggctctgcaatttttcaatattggtgttccgttttgaaacctcgtcttgcagtttttcgttggcacgttccagttctttcagttttccactcccgaaaagagaagcaactccactagttatggctgtcgctgccgtggtggctgtcttctttaacttgtcagtgcgtatttctgatttcacctgtttcagttcctgctcggcaagatttatctgttcttctttgtgccgtttggctgcatccatgcgttgcagttcagctttctgcttctcaatgataaagtcgttccgttccagatgctccttaccagtgacagcctttgactgcccgcgttccatcagcaggatgtcggatgcaagggtctgcatctgcatcatgtcatcgtcattgagctttcggctctttcctgtttcgtggttcatccagtcgaaaacgatatgggcatgatagttcggcttgaaccatctgtccccgactttgaagctttccctgtcttccgcttccggctgaccgttcagccaatgcccttcatccttgtgcaggaagatttgcagcggtgtgattccccagcgtctttgacactcctcaccgaatttacgcacgtctgccagtgtggtgtccgacctgacaagcagcactccttcacgtatgggggagcatcccgcaatcttgactattttaccgttcttgcctttgcgttcacgctccttttcctgcatggcacgtccggtcttttcctttaccatctgtctgatattgtcataatgcatccgcaaatccggactgccgaagtcgggatttatccactgttcgttatcggtggatagttcaggaacgacatagattctggactctccgatgtggcgcatgtattcggcagtcctcctgttgtgagcctcgctcgatgcgatgttgcagggcttgatatgtatgcttgattttgttgccatagatacttgttttttggtttgtactttattgtttgcttttccgctgtccgtaaacgcatggggttcttaggggtgcaacccataagcggagattgcaaagagagggtcactctttgctctgggttctcaggggagaaacgccctgagtgggtcattagggtaaaaccctaatcccctcgggagagcccacaactacgtaagcggagcgtgtagttatagtgggctatatcaatggcaagccattgtctgcaaactccagcctacggcttccgctctcctccgtcagggaggtttttcatcatcgttgccgattggagatgcaccgaccagcacaaggtctaaatcgtctatcagtttttgcaggacgggattcttctctatcatccgctggaggattctctcagcctcgaccaagtggttggctgtactcatcaccttgccctcccgtatctgaaagataatccaatcggctatgtcgatatgggcttctttttgtttcggggtggcattcctttcgatgatgtccgaaaccaccaccttacaaaagtacatgctctcggctcgctgtttccactcggcataagcatcggcatcgggaaagagaagcacggttcgccctgacagtacacggagtttctcttctctcatctgactcttaccacccgtagccagccatacataatcggggaagatagcagaaccgataacggcactcttctcggattccaccaagaccaccaccttgtcgggatgcgttttcaacaagtgttccccgaaaaggcattgggatagttgccaatcctctgccaacacacgctgctttttcaatatgctgtgtatccagttcactgccgatgtctgtcctcccttgatacggtgtccgtcttcgggattgtactgcatcacctttcccgtgcgtaccttgcccgtcctgtctatctgccaaaagataacagagccgtcacgggtagcccccaaacggtattcctccaacaaccgcttcaacacctctttcgccttgtcgccatagtaggaagtaaggagtgtgaagaggaaacggaagaaattgctacgctcgctttgcgacttctccacatagtgagggggaatatagccgatggctgtcggcttactttgctgcttcactttcttctgctctgctctttgcctgtcaaaagagaaatcattggtagttctgtgttcaggatgctcttgaaaatactctttcggagtgtagtgatacccacaaccgctttcgtggttacatctgccgaccgatggatgcaacggcacattattttcgtccacgtaatagacgaaagaatgcctgtctccgcatttggggcaggtatgccgtgttgccgttcctttatacttctgtaatgaataattgcccatagcttagtccgtttttgatggttgattgtcggctgtcccatcctgtcccattgtcccacactctaagggttgggacagtgggacacttgggacacctgcgtttttactctctttgctgcgctggatgatacggtttacggtggacttgccacaattcacctgtgaggctatctccctgacggacttgcccgattgggagagttgcagaatttggcaatccctttggcttgattcattgtcgcccaattttttcaagtgttccttttccgtggaatagcccctgaacacgaactgcaagaaagcatccaccttgtcaatctcgtaaacgattacattatccgcatcatgagagaacgtgccatagcgcactttaagctgcttcacatagcgaagccctccgtcttgggcactttttccaatggtgaacacgctgtcaaagaaattgtagagccgtttgcttccggcaaggtcgttggatgtgatgggacaatccaaagagcgtttgggcgtatgtgctaggacaaggatagagagcgcatatctctttttgagattgttcagctgaatcatcagccgtcctgcggcatcgcctttctccatggcgcaacacaggtaggtaagattgtcaatgatgaaaatcttgcagtcggtctgcacagccatctgttcaatgccgcctatgatagcttcctcaaagttggcatccaaaagctggttgcagtcaatagacacccgatagagtttgtcgggaaaggtgtagagctctccatgctcgttggtatagcggagctggaactgcttttcggacagttcaaagtccagatacagcacattgtcggttcgggcgatgcggtcggctatctgcacggcaaggatggacttgcccacgttggaatcggcaaacaagcaggagagttccccctcgtaccaaaagctgtcccacagcgcacggggcgtaggcaataacgatgcttcaagaatggtttggtttgccgtcttgatattcatcatgcctacactgtcgggcataccgttatgcgcttgggatgcttttgtgaggtcgccacgtatcaggttgatatagttcttatcctcttccatatcattcaccagttacgtgggttgggcttgcgacggtgggaagaggataaggacttgttcagttcctcgtctgacaacggtatgggattctttcgggcggtttccagccacttgtccagttcgtcacggtaaaggcaatagcgtttgccgggcttggtggcagggattgtcccttctgacagtttcatgtagagcgtacccttagggatacctaaatactctgctgcctcgtccacagacatgggcacgtgggtgtccaccgttttggcattgttcacactgcgctgctcggcgagcaggcttttcaggctcatcacttcgtctcgaagctgagcgacaacctcggggaggtcgttgaaggtaagaattgatttttccattcgcgtactcgtctcttttgtaagacttggcgcaaaggactgaaatgatatatccgtgaatatctccacgacacgtcattgcaaaataattcccgaataattaagcccagccataaatgacgggtaaaattactcgggaaacgatgtaaaacaggcggttatgagttaccggatggttgtcgttggtgtcgtgattatcctaattccgcacataatcctcgggatagtggaaatcaagtttgccgttttcgggttcatcaatgggaatttccgtctttaacggctctaccttgaaattcttgatggttgataagtctgtatcagcaaacgatttcgggaaaagggctttgatgaacttggcacggttatccccattgtagtatctcttgtacaggaaacgctcagagatattccatacgaagtgacggagtggaatgttgttgatgtctttggtaaacggtctttgtatgggcttcggggtataagtgttaagattcatccatttgtccacctcagtacagatgtggttcacggtttcttggtcggcaatgcgaggcaggtaataatggcaatactccatgaccatgcggatgcgctcttccttttcccgttgctctctgcttgcgtaattggcacggttcttttcgtgaagatccggggcgatagtaagctctatcggttgtgtttggataagtgtctcttcttttgtcggggatgattcgggtacaggctcagggactgatgtaggtccaggcacagatgtggcttcttcaagtgtattttgtgacagttcttcctgcacctctatggcttcggcaatcgtttctttcttgccgaacttgattttgtagatttcgtatgtatcaaagataagtgtctgaaaggagagatagagcaaccatcccaacaggttacagcatacgaatactatccacctgacaaagttgtcttggttgaagctgtccgctattaccagcgtggcaatggaagatattaggacgatggcgaagccgacaaagcccaagatgatgtatttgtccttgattgatgattccatatttcgttgagagattgaatgttcctgtattattttgtgcaaagttaatgctatttttcccaattactgcccgttatttgcggttagaacggtctttttcaatgtatttcacgaaatgtcatcatatcatactctgtttcatactctgaggggcttataaatggtggcatcaagccaaaaacatagaggggcgattatagccttgtagccataaccgcccctctgaatacctgtcaatgtgagacatttatgcctccttgcgtttcaaggttatcttgtccaccacctgacacatctgctgcgctgctatcttggaatagatttgtgtggtggtaatgttcttatgtccgagataggcttggatgacagccatgtccgttcccatttccacgtgcaggcttccgaagctgtggcgggtacagtgaaaggtgattttcttggttatccctgctgccgtgagccaccgttggagtggtccttgcagcatcttgtccttgaaatcctcaaagataagtccctcgccccgttctcccagcagtccataggcttcatcactgatggggttatgcactatttctttggttttctgcatacgggtggtaacgaacatcctgccgttggtgtatggttgtatctgctgccacgtgagctgtctgatgtcgctctttctcagtcccgtaagacaggcgaaaagaaaagcttttttcaagacctcctcctcacagggtgtttcggcaagccgtatcagttcctcttggctcaaatgctccctgatggtgggaatgcactcgatgcggtctaagaagccgtttgggttctcctttatcttcctgtcacggtaagcggtgtgcagcacggcacggaaagttgaccaatagcctgctgcggagttgatgtgcagcttttggttggtgtggatggattggggtgcatcaagcaggtattccatgaacttgcggcacaaatccacatccacctcctcaaaggtgcatttgccgttcacgaaccgctggaaatgcttgtatacgtgctgccacttgatattcttgcggtcagccagtcctttgaaataggcaaggaaatcgcccttcatcttggtcttgtcaaaaaagccgttgttttcattgaaaatggcttcgtagcgctggttgcgcaggatgaccgctttcttcatcatgcgtgcgttgaagtcccgttcctgctggtttgcaggtttggcgaagatgtaaattcctaaggcttcacgtgtaatcactctcatggtgacattgtcacggtagccgggatagtagtcaaggcatagtgaatactgtgtcccgttcttaatcttgcgcttacgcaaggtaactgttttgcatttactcataataattatgttttaattggttgtatacattttggagttgtatccatgtttccgatggcaaaggaacaacgtgaaatatccgtgaatacctccacgatacatcattttgaaataattttcgataatcccgatttttcacggttatttgttcctttcagccatgacacgctccacatctgagcgcaaaagcaggtttttcacacccacctttatcttttcgatgtgcttcaccttgacgatatggcagatgttggctgacgaaagaccatagatttgctgcacctgctcaacggtatagtagcgttcatcgttcacaaggtcagttctgcggagttcgttcaaatgtgatttggagtaataggtacgcccgtactctcttttagtgggtatcttatggcgataggtgtaggcacggagtgcggtcggcttcatgccgaacagttcctccacctcctcggtcagtagccagtcggtaatttcgctaatatcaactgccacaccgaaaaactcgtcaatatgcttcttgctgtaatagttctttcctgcgatacggcagatggggatatggttacgcttggcggaagtgtaaagccatgactgctttaccttaaaaagggacatcacctcctcgcccgaatagaagtccaacacttcttcgctttccttttcccttttttctcttttggcaggtaaggaagatgaagatgatttccttggtgtggaggtgttgccgggcaggatgcggtgatagggattgccctccaacatctgctcgatgtcggctctgcggatgaatgccatgcggttgctgatgcgtgaggctttcagcttgccgatggctacaagtttgtaaatgtactgtcgggaacagcccatgaggatggctgctttggaaaaggtgagatactcctgatgctgtatctccatcaagggttgggcgactttgaagaggttgttcttctgcatcactctggctcgtttggcttctgcctgacaagcctcactgcaatatctttgcataccgcttcgggttacaaaggacttgccgcaaaaactgcattttctggttgctttcataccgttttatcgtttaatggttcatttcttcaatcctatatctctgaaatggtaaacggatgtgaacggaagtcaaccattgtcgcttttctacacagtgtgactgtttccgcatatcggggcggttattgtcgcttgtcgtaaacggttgtaaacccttgtcaactgtctgcacggtgtgacaaaaaacaagccccgcaaattctccacgtcagaaatacgtctcaaaaatatgtggaaatttgggaagcgacaaatggcaaccgaaaagtgttaaattttagaatatgctggtaattaaagatttacactcggatatttctgattagttttggttgttctatggttataaatactaatgccggaaacgacagttccccgcctggaaacgggaagttaatgtatacagtatgactgttttctacacttcattcagttaaaagcaactatacttatactttcctctttttaaaagcaatgaagtacccggaaatttattacctttgtgtaattgatttataaaaccggagtatatgagcactaaaatttatcccattggcatacagaatttcgaaaagattcgtaatgacggctatttatatattgataaaacggcattgatgtatcaaatggtaaaaaccggtagttactatttcttaagccgcccgcgccgcttcggaaagagtctgctcatctctactcttgaagcctattttcaaggaaaaaaagaactgtttacaggactggctgtagaaaggttggaaaaggattggattaaatatccgatactacatctggaccttaatatcgaaaaatatgatacgccggaaagtctggataatatactcgaaaagtcgttgactgcatgggaaaagctctatggtgccgagccatccgaacgctcattttccctgcgttttgccggtatcatagaacgcgcctgcaagcaggcaggacaacgcgtagttattttggtagatgaatatgataagcccatgttgcaagccatcagcaacgaaaaattgcaaaaacaattccgggacactttaaaacctttctatggggcactcaaaacaatggatggctatataaagtttgcgttcttgaccggcgttacaaagtttggcaaagtcagtgtgtttagcgacttgaataatttggatgacatctcaatgcgaaaagattatgttgaaatctgcggtgtcagcgatcaggagcttcatgaaaacttagatatcgaacttcatgagtttgcagagacgcaaggtttgtcgtatgacaagctctgtacaaaactaaaagaatattatgatggctatcattttacacataattctatcggtatatataatccgtttagtctgctcaacgctttcaaatataaagaattcggcagttattggtttgagacggggacacctacctatctggttaagttactaaaaaagcatcattatgacctggaacggatggcacacgaagaaactgatgcacaagtactgaatagcatcgactccgaatcaaccaacccgattccagtgatttaccaaagcggatacctcaccattaaaggatatgacgaacgttttggcatataccgtttaggtttccccaaccgtgaagtagaagaaggattcattcgctttctgcttcctttttacgcgaatgtgaataaggtggaatccccatttgaagttcaaaaattcgtccgtgaagtagaaacgggagattatgattctttcttccaccgcctgcagagtttctttgccgatacgacttacgaagtaatccgggagcaggaactacattatgagaacgtacttttcattgttttcaaattggttggtttctataccaaagtggaataccacaccaataacggacgtgtagatctcattctgcaaacagacaaattcatttatattatggaattcaagctaaacggaacagcagaagaggctttgcagcagattaacaacaaacgctatgcgctgcctttcgaagcggatggacgcaaactattcaagataggaattaacttcagtgagaaaacccgtaatatcgagaaatgggtggtagcatcctgaagtataccctgccttgacaaagagactgttattattaacgtggtgatcttattccaatcccggccacgcttttgttgaatacgtagcctcaagcgcattttctaaattatcattcagattcggaaagaagtcaattcctgtctttttttccagttcgtctattgataatgcataatcaactaactttgttgatttcggagtgtcggtatgctccatccaaaaagcgatcgctttgaatgaatctccttttttaaacaacaaagccatataataatatctaggaatgggcttgctacggtcgttactaatatatcctctgatctgatcttccttatcaatcgttcctccttttactacatacaaagtatctgaagctgtacagctacgcccccatgattgcacttgtccctccaaagtcaaccaaatgcctgtattaaatttatttcgttgaggactcatattagtgtaataaaaagtctgttcatttacctcacgtgaataaagtctgtcggcggaagcacaaagatgtcctctgtcataaccttgttttccaaaatctgcttgtacacgttgatactgtgaaccaatagccggatctgcatcaaaaggttcatcactacgtgacacattttgctgttttgtttgattgtcaaaccgaaatgcaatccaacgggaatgtttcttactcttatcgtattccatactgaaagaggttactttctgtccattgaatgtcgtatagtgagttacaaacacatcgtttgcaccattgcgaagggcagggagttctacgataccggtggcaaaattattgctattatttttgtcattatcactacatgaaaaaaaggaaacacataaaaaaaggaaaccaccataaataaatagacttttcatgttaccgccaatattaaaaaggattatataatatacaaatagaaaaagttgccctacaaagagcagcttttcctatttgaaattacaatttccacggtaggaaacgagagtttctaaggcgggacactacagtttctacgtaaggatactgtcgtttccccgtagagacaccaccatttctccatagagtcaccccaattatcccatagctttgcatcaaggaatcaaggctttttctttgattatataacgtgttgcagatactttatctgcaacctatctgccgcaggtatctgcaacgttccaactgtttgtcaactagtgtattacacgcgtttggttgcaggtgcagatgtttttatgttttttcaactttatagaggaaggattacgcatcaaaattagggtcacaaccgtaagtcataaacccaattcacctctgtgtcctccgtgtcctctgtggtgaaaagaatcaaaactgcatagaaacgagttaaacggtgcgctaatgaataggtccagggtgaggggtggtgagggtagatttataactttcgtatttttttttgaggataaaaaaggagatagtatagaaaataataaaataaaaggttataaatctaccctcaccacccctcaccctggacccatatcttataataaaaagataacggggaatcttaaaaactcaatcatctttttcagatttaccacaacgtttccagaatactccattattttattcaaaaccgtacagagaatgagccaaacccgtacgggaatgaatcaatttttagggatatggctgtcctgaaccaaatccccaagaattataattgagctggcttgctgaatatacataacttccagcatttatttccatatttccaccacatttaaaaaaatatgtatatctttgtcacacgctttctgctcatcagcgtgatgaaattagcgggaggcgctatatattacttaaattaggaatatgtaagtgttatctctcggaatcagaatctagcgatttaaaccaaggagagatgatgcgacagatgttccacgttaacggcttatatcaacatatccgtaaaagatgtgttatatataaacgattgacgtgggtgtctgttgtcattattatcttttgggagggtttcgctaggccttgattccggataatggtgcaacagcattcacgtcttttttgtgtccggtcggttatgattacccctaaaagtctaacctaaacaattccccgtccgcccgaaatacagaaaacgtggatgtccgttgtgccacataaacaaaataatactccatttttattgtggaacacattaaaacaaaagcattatgccaaaatggattagcgtagaagaagcggcggccaagtatggaatcaacaaagaagtaatctggctttgggcggatatgaaaagattcccaatgtcgtatgagaaaggtatcaccactgttgatgaagaaagccttatcggattcctgcatcagaataaggatcgagttacagccgagtatatcgacacattggaagacctatgtattgaaaaagcaaatatctgtaacttatatgctgaaattattggctgtcaagacaaagaactcttgtatcaaagagagcaaatagctcgaatgaaagagatacaaacagctatgaaaaggcaaaacagccggctccgggattgtgagaaagtgttcacgaaatatgaagagaactttagtacctgctgggttggaagaatctgcgctcacttaaggcggctgatatggttgatacgacggtaaataccattctatctccttttaaataaggaataaccgataccgttgagcggaaatgtctaaaagtactcttgaatagaaaatttaaagatgcccatgaatagatatatttaaagatatccctaaatagaaatgtttaaaaatactagaaatatactgtagtaagattttttatccattcgttttatattcttaactccgaaaaattcgtaagtgtagataaaccaactacttttggctctcgaatttgcagcatttttgaatgtcttgcgtctaataaacataaactaatatatttctagtcatgaaacacagactgttactactaattctattcgtattcgctacctccgtggcggcggggtgggcacaaaaatccacagctccttcttatacagtcaaaggagtacttattgattctttaacacaagagggagaaccgtatgctaccatcaaaatagcaaagaaaaatgctccggataaagcagtcaagatggcggtgactggggcgaatggtaaatttcaggagaaactgaatgtcgctgcgggcaattacatcatcactatttcttcgattggtaaagcgccgatagtaaaggaatttactctaaaaccgtccgtgaaggaggttgacttgggcacaatgatttcttcagaggccaataacgtattgaaaggagtggaggtagttgcacaaaaacctttggtaaaggtagatgtggataagattgaatataatattgaagatgacccggactcaaaatcgaacagtatattggagatgcttcggaaagtgcctttggtaacggtggatggagaagacaatgtacaagtaaacggcagtagcagtttcaagatacatgtaaatggaaagcccaataatatgatgagtaataatccgaaggaagtactgaaaagtatgccggcaaacacgatcaaatatattgaggtgataacttcaccgggagctaaatatgatgcggaaggtatcggaggtattctgaatatcgtcacagtaggttccggatttgaaggatacacggctactttcagaggaaatgctaataataacggagtaggtgccggcacttacgcaatggtgaaacaaggtaaactgactgtttctgccaactataactacaattataataatagcccgcgcagctattccgacagttatcgcgaaaactacgaaccggataaagagaatgaaaaatatctggaatcggaaagtagctccaagtcgaaagggaatttccagtatggcaatttggaagccagttacgagattgatacgttgaggttgctgaccgtggctttcggaatgtacggtagcagtgacaaaagtaacagtggcggaaatacgattatgcacggagctgatcgacaggattttgcgtaccgttatagaaccgacaatcatggaaaagggtcatggtattctatcaacggaaatatagactatcaacgtacttcccgaaaaaataaagaacggatgattacgttttcttataaaatcaattcccaaccccaaacgaatgattcatataatacttatctggacatcgagcctgatgagaataaactggatatcattaaagaattgtcattaaagaatttccattcggacggaaagacaaatacgatggagcagactttccaggtggactatactactccgattggaaagctgcatacaattgaaaccggtgccaaatatattttccgacgtaactccagtgataatcggttttatgaagccgagggagcaagtgaaaactatgcatataatgagaatcgtagtagcgagtaccgtcatttgaatcatattctctctgcttatgccggatatacgctgaaatacaagggatttactttcaaaccgggattacgttatgagcaaaccatacaagaggtgaagtatctggtgggtccgggcgagaactttgattcgaattttagtgatctggttccttccgtttccttgggaataaaactaggaaagacgcagaatttgcgtggtggatataatatgcgtatctggcgtccgggtatctggaatttgaatccttatttcgataatcagaatccgatgtttatcaatcagggaaatccgaacctgaagagtgagaagagtcattcgttcgacttgtcttacagcagttttacgtccaagttcaacatcaatctttctttgcgtcattctttcaataacaatggaattgaaagaatcagccgtttgattactgataaagacggagaaatctttgaagatgggcataaagctccctacggtgcactgtatagcacatacggtaatatcggaaagagccgggaaacaggattgaacttttatttgaactggaacgcttctcctaaaacgagaatttacgtcaatggacgtggcaattatagcgatttgcggagtcctgcccaagagttgcacaattatggatggaatgcttctgcttatggaggaattcagcagaccttaccgggaaaagtacgtttgagcctgaacggcggaggtagcacaccccgaatcagtttgcagggaaaaggttcaggatatagttattatagtttgggattgagccgttctttcctgaaagaagaacgtctttctttgaatatttattgcagcaatgttctggagaaatacagaacttacaataaccacacagaaggagctaactttatttcgaagagttcgagcaaatatccgagccggtattacggtttcagtattagctatcggcttggagagttgaaagccagtgtgaagaaagccgcacgaagcatcgacaatgacgatgtgaaaggtggcggcggaggaggtggaaacaccggtggtggaggtggtcagtagaccacttccgcacaccgagattccctcttatttctgtctcacgtcttgcttgttggtgttaaaaccaagtttggttaatccggcctgtacgtcgggatggctcatgaagagtttccacaataatccgctccggtagttttcgatcatgacagcaataggaccctggtcgatagccagataacgttgcggataccaattgtccgtttcgctgaaagcatcgtagaatccgaaaggaccgaacactttatctcccataccatatagatggcgcatcacttgcatggaatattccggtgtatagacaatggatgaaagcgcggcggtaggggagattactcctttgtcctcctgctcattgggcgaatgagccgcatatccatcgacggagtagctggcagtcagtccccaacaatccggtccgaaacctttgtaatgtttagggttgcggatgcagtaagcacggttcaccagtgtcaggttgcgcatttcgtggaagtagctgggacagtattcatcttttagtcccaccggatcaagtccgaggaaagagtattgagcccagaaaagcggtccggcttcggtgccctgatagcggaggtgcaactcgattccttccactttatgcggagaaacgatggctccgttctgtgcccaaccgtcatgatagacagccgcaggtactccgtgtgtaggagaagcggcggcaagaatatacataatcatacattcgttgtaaccgtgtacagggaaattcatttcccagccatacgtcggactccaatgccagtaaagaacgttttgcccgccttgccgataccagttccagtcgacatcccgccaaatctggtcgatccgttgggcgagggctttctctttctcgtttccgttgacgtaatattggtgtacggccagtagcccttggatgaggaaagcggtctctaccagatcgcccccattatctttctgaccgaatggtttcaccttgcccgtatcaccataccaccaatgagggtaggctccatggaaacggtctgccttttcgaggaaagaaacgatgcgttccattcgtgccagtccctcttcgcgggtgacgtaaccgcgttcgattcccgcaaggatagccatgatgccgaagccgctgccgccggaagtgactacgttggcatcgttttctggataaacgccgtccacatgataacgttcgggagccaagccgctattcggctcggcaccttcccagaaatagaggaaagtccgtcgctggacggtatccatcagggcgtcgtccgataacgagtcggtggctgcggaaaggttgttgcttttgcttttccctttacagctctggaaagtcagggcaacggcggatagaaatagtaacatgagcggaagtgcactcatttctattattcttttatatttatcgttcataatcaaggtgataaaagtttagtttaacgtgaacttcgcggttttcacatcacggctgttcgtaccgatcatcacttcaaagtcgcccggttcggcaaccagttgcaagtcataattatagtatcgaagcatttccggagcaatcttgaaacggacaatcttcatttcacccggttccaggaatatcttttggaaacctttcaactctttgacgggacgggtactgctacccacaacgtcgcggatataaagctgtaccacttccgagccgggccatgttccggtattggtaacctccactgccgcggtcaacgaaccgttcatgtccatggaagaatgactcaagtcgatgtcactgtaagagaacgtcgtataagaaaggccgtaaccgaacggataaagcggatcattatccacatcgagatagttgctgcggaatttctcgaaccatttgccatctttcaatgggcgtccggtatttttatgcgcataataaagaggtatctggccgacattcttcgggaaagtcatagtcagtttaccacccggattgacgtaaccgaagagggcgtcaccaatggcgtaagcggcttcactacctccgaaccatacattcagaatagcaggcacatgctcctgttcccaattcagcgtaagcggacgtccggtgaataacaccagtaccaccggtttgcctgtctttaaaagctctttcaacagattctgttgtacgtcgggaatattcaagtctgtacgactgctgctttcaccgctcatttcagaagattcgcctagcgctgcgatgatgatatccgaccgacgggctacgttcaatgcttcgtccagtaactgctggtcggtgcggttgtcacggttcagggaacggccgaacatcgttgcccgttcttcgtaacttgcatcactaatcaggttgcttcctttagcgtacatgatattcgcttttccggctgtcatctctttcaatccttctaccaaagaagggcaacggtcgagcacagctgctacgctccatgtacccggcatattgctacggctgtttgccaacggaccgattactgcaatatttcctttagggttgaaaggcaacaacggatttccgttcggattaccgtcgggactgtcattctttagaagaacgaaactttctgctgcaattctgcgggctgcatcacgatgggctttggtaaagatgtcgcgtgccggacgtttcggatcgcaatatttataaggattatcaaacaatcccagtttatatttggcttccagaatacgacggcaagccgtattcaatgtttccatagagacttttccttcctgaacggatttcttcagtgtccctacaaaaccctcgcttaccatatccatatccactccggcgttgatggcacgggcggatactgtctgaagatcaccgataccgtggtcgatcatttctgaaatgcccgtataatcagttaccacaaaaccgttgaatccccactgtccgcggagaatatccgtcatcagccatttattggcagtggccggaataccgtctacttcattaaaagaagccatcacgctgcctacacccgcttcaacggctgcttcatacggcagcatataatcattgaacattcgttggcggctcatatccacggtgttatagtcgcggccggcttcgcctgccccatataacgcaaagtgttttacgcaggccatgatttcgtcattccgttccatgtttttcccctgatagccgcgcaccattgcttcggcaatcatggcaccgagaaacgggtcttcgccactaccttcggatacgcgtccccaacgagggtcacgtgaaatatccaccatcgggctgaaagtccatgagattccatcagcacttgcttctacagccgcaatgcgggcagactcttcaatggctgtcatgtcccaggtgcaagacaaaccgagcgggatagggaacatcgtttcgtatccgtgaataacgtccatcccgaacaataacggaatacccagccgggaatcttccacagcttgtttctgtacttcacgtattttctctactcctttcagattgaacaatcctcccacttcgcctttcttgatttttgcggcgatgtcgctgcttttagcctgtcccgtagtgatctctccggtgacaggaaggtttaactgtccgattttttcttccagcgtcattttattcatcaatgcgtcgatgaaacgatccatatcctgtggcgacttttgtgccgacgcggttagaaaacctgcggcaaacaacaggacggatagacttaactttttgtatatcatattattatagttgcttttatctctattcatataaagtcctcctgatgcgttgaatgttcggcaccgaggaggacattgttcgacaccgaggaacagtagtttcggcaccgaggaaacaaccgttcggcaccgaggaactttcttattggtagtcggggttctgtaccaacactcccttagacttgtcgatctctgtctgcggcagtggaagcagtgcgtttttgtcctgataattggttttaccggctgcgtgcaacacttcttttgcaatgccccaacgaacgaggtcgtagaaacggtcgaattccaaccctaattccacacggcgttcgtggcggatggcctcacgcaattctccctgatcggtagtcgtcactttaggtaatatattggtattggtgcctctggcgcgtgcgcgtacttgttccaaatagtcgattgcttcacccggaatacctttttcattagctgattcggctcccatcagcagtacatctgcgtagcggatcagacgaatgtttacccaataacctttattggtatattctttacgtaatgccgggtcggtataggctttcttattgaaataagcacccattgccggggaaaccggagactcgccgtatggttcgttggtgttttccggtgtgataggatcgctgtccgagtggcggaagtagagtagggtagagtttttgcgtggatcaccctgttcgtatgcttgcgccatatactctgttgccatgtgccatccccagcccaagtcccattgacctgctccgcgtacaccttgtacttcacagaactggctgccgataacggtactttgaggaagagcggcagtagctgtacattgcaactcgaatatagaacctccgttattttcaccatcgtccgtgaaaatctcattatacggagtctttaggttgtagagcccctttttgatgacatcggtggaggctgtgtacatattgttccagtcgttgcgcatcatataagtacgcgcatgtaaggaacgggcagctccccaagtcagtcgtccggtgtattcgctgctccatgtttccggcaatgactcttctgctgttttcaggtccttgtcgatttgctcatagattttatcagcacttgtcttcgggatattggcttccgaagcatcgttgattttataagtcaccaaaggaacttcgccgaaagctcttaccagattgaagtagcaataagcacggaagaaagaggcctctcccttattgatgatgtcttcagtttctgtttgtccggctgtttctttttctgcaatggcatcaagaatctcattacattggtagatgatggcataattctgtccccaataagcacccagtaggccgttggtcggtgtatacacaaaatcatcatacatttcggctacatcagagccatcgctggcgatacttcctttttccgaatcttccgaacggaaacagtggatggcaaaagcaggaggaccggctgtcacattatagttacgcatcatcgtatagacattataaatcttaccgttgaccagagcgttcggattatcatcttccgtaaactgtccttgtggactacgatccagaaagtcactacagctgcctagaaataatgtagttgaagtaataagggctgcaaatatatatttattcagtttcatataatgatagttttaaagattaaagttgtgttccgcatggaaaactggcagtggcaccttgccactagaatgttaggttgataccgaaggtgtagactgcaggtacaggataactaccgttatctactccgaaagcggtggcggttcctccgagttcgggagtatatccggtattatgtttccatgtcttcaggttctgtatgttgacatagactttcagggcttgcagacgtattttggcaattaagctcttgtcgaacgtataagctaactgtacattacggatacggaagaaactaccgttctcaatgtaatagtcagagttgaggttgttgatggaatgtttggtgttcagcaacggttgggtgttggacgtaccttctccgtgccagcggtccaggcgttgttccaggtagttgaactgggcaaaattgtagttatcccatgtacggaaaatcttgtttccgccttgtcccatcatgtcgatgcctaacgaccaattcttgtagtctactccgagagaaaaaccgtaagtgacctttggagtcgggttacctatcatggtacggtcttctggggtgatttctccgtcaccgttcacatcggcgaatttcaggtcaccgggggtaacggtagccagtgtatttttgggtgatgcgtcaatatctgcttgtgactgataaacgcctgccactttataaccatagaaatatccgataggataacctgccattgtgtaactttgctgcttatctccggcaatgatggagtatccttcctgaacaagactttttacctcattcttgatagtagtcaggttggcactgacggaatatccccaatcaccaatctgatcgcgccaggtgacagccatttccactcctttattctggatctctcccaagtttccgataccagggatagttccggaaattccgggaacttcggctaacaaatctttggtattcttcttatagtaaacaccctcaaaatgcaagcggttgcgaagcaggttcgtttcaaatccggcttcccaggcttctactttttcccaacgcaggttaggattaggaagataggcaagctggtatccgggataaatgatggacggtttaccgaatacggccgaataagcattggtcaataagggttcggcaggataggctttatccaggttctggtttcctaacgtaccgtaagatgctttgattttcaacatatccagccatttgatgtctttcataaattcttcttcggacatcagccaacctccacccagcgagaagaagttctgccattcatttcctgtgtaggagaaagcggaagaaccatcccggcggaaagaaccgttgaacaagtatttgcctttatagttgtagatcacgcgtgcaagtacggataatgtactgcgttcccattgagtacttccattggtagcggtagctgcatcgccgatgctgacaaaccatttgtccggattatccggaataaccagtccgaccccctgcttgcgtgctccgtccaatcggctcaacgaattataataggtagtaaaaccggcggtagctgtcaggttatgatttccattatcaaagctgttggtgtatgtcaacaggtagtcactctgaacttttgtttcattctctttaaactggctgacctcggtcttgcctgttcccaaagtagagatccctccgttgacagcggcatcgtatacttttacgatcggtgtatatgtccgtccgttgttcgacgcataatccatggagaacatcgctttgaacgtgaaatgtttcaggaagtctacctcaccataaatattaccggatgcccggtagttttccgctttggtagtattcgcttttaattcgacgtctaccatcgggttgttgatctgcgctttctggaattcgggcagagccgtatataatccgtattcgttgttatataccggagcgataggagttgcacgcagggcattcaacacctgtttggaatctgcaggaagcatacgtgctccgttgaattggaaaccgactttcaaaaagtccgtaatcttataatcattacttgcgttgatggttaccttgctgaatttttcatgctcgatgtttccttgttcgtaagagtagcccactcccaggtagaaactatgtttgggcgaagcccctgtaatactgatgttattgtttgtaatgaaagcagtctggaaaatttcgtcttgccagtcggtattggcatcccagccggtataatcgaaaggatcgtctccttgattggcgagctgttcgttatatagttccttgaattgtgaaccattcaccagtttcactttatccaccactttcttgaaaccgaaagaagtattgatattgaccagcgtctgcccctctttggctttctttgtggtaatgatgatgacaccattcgcaccgcgaacaccgaagatagccagagatgacgggtctttcaggatttccatagattcgatgtcctccggattcaggaaattgatgttgtcattgaataatccgtcgacaatgtacagcggtttatatccgttgatggagtttgttccgcgaatacgtatttccggatcagatccggcccggccggagttgacaatctgcacacctgctacctttccctgcagggaagacagcggattcattgccggtttgttggctaactcttctcctttgatattggtgatagaacctgtcaagtctcttttctttgcactaccgtatccgataacgactgtttcggctagtacttgtgaatcttcttttaaagtgacattgatgacgttctgtgtccccactttaatggtttgcgaagtcatccccacgtatgaaaatgccagtacgtcctccggtgtgacagagattgaatatttaccgtccatatccgtgatggttccggtggaagttccttgtacgagtaccgatgcaccgatcaatggttcattggcagcatccgtcactgttcctgtcaccgtctttgtctgtgcaaagaccgatgtggaggtcaatagcaggcaaacaagcgtcatgatgctccttgacctgatggcttttttctgaagatgttgtaaaagtctagtcctcattgcattaaatttttccatttgttattatttaggttgaagtcttttttctgccgtcttttggcgagagtaacaaaggaaacaaacgaaattcaaaaaagatttgggaaaaaagagaggatgcttgtttttaacacaaaagggtgaggagactgttgaaaaagttcagacatgaaccggtgtggttcatgcctttcctgttttaaaacatttgttccgcagtggtcatacattgaatgacgtcttctttgctgccattgaaaggacctgatttctctatttttaatgtagacatggcggctgcaaaacgaccggcttcttcgatgccggcacctgatacccgttgatataaatagccgatggtatacgtgtctccacatcccgttgcgtctaccacttctctgggcttataagccggaatacgatagaagtcttttccgtcgaagataagtgagcccatgccgcctaatgtgactaatacttctttcactccccattcatataattggcgggcagcttcatgcgggtcggaaagaccggtcagtacttccatttcatgctcgttgactttgaggaaatgaatatattgcaaggcttctctcttatctgtccagtccaccggatagacgtgggtgtcacgcacttcacgtaaatagccttgtgagtctactgcaatcaaccctttttgagatagttctttgattacttccaatgagaagtcgtcagccagcagagagccgagatggtagatttgcgcatctatctctttcaactgactggctgtgaacggatcggctttcgctaatacccgttgggtacggtcgtccggattggctccatagatgttctcgaagtatacggagtgtttgctcggtaaggcagttacgttaatacccactttgcgcagctgctctacaactttcatttcagtggcacctactgccgttaccagcgcataatcgatatcattaaaatggcggatggcatgtgagcaataaaaagctgttcctcccggcatgtagacagtgttttgaggagtgactactttgtctaatgtgatgtgaccgatgcagcaaagttgatgtttattcatgtttaactaattaaaaagcctccaagatagtatcttgaaggcttatagtttatttttggtgcggatgataggactcgaacctacacgcctcacggcaccagatcctaagtctggcgcggctaccaattacgccacatccgcatgtgtagcttttttgtttagcggtgcaaagataggaagattttctgatttggcaaataattcgacaataaagttattcacttaagatttcgaatgctttttcaatcagagtgtctttgtgcttaagttgatctgattcagacatattgatggcaatgtccggctcaataccttcttccaagggttgcttgtttttgtcgaaatgcggactggcggagaaacggacgctccatccattaggtaattccgatgagaagggaagtcccgaaccacctccggtccagtcacctaactggatgattcttttctcttcgttgtccttgtttaaactgcgcatcgcattcacaaaatcattggtggcactataacaacgacgattggtcagaatgattactttcttctgccaccggatgctgttggatggttccagatagatcggctccatcttggagaaatcattatgtcccggtccggttttgtgctgtatatatccggtaagtgttttctcgttggtaaaccgggcggcaatgcgggtggaggtggtcaggtttccgcctccgttatcacgtacatcgatgattaatccgttgcaggtggccaggtagaggagaacttcatccaagttgccatcgcccactccggaactgaaactttcataacgaatatatcctatattattatcgaatattttatactttaaaccggcggatgtatagtatcctgtgctggcactgcccagataagtttgatagagaatatcttcccggtagttccagtcgtaaccctgataccattcatcgtagaaagaagtacgtttggcagaggatagattgacatgtccgtcttttaaaatgtatagcatctggcttaggatgtcgaacaggtcgtcattagacattgtcggaataatcagtgggctatatttgtcgtgaacggcatcccagtcaataccttttgcttccagaaaacaatactgttcgtcgatgatcttccatagttgttcgaagtttcctacaggatcattggcgtagtcttcttctccgatgcaaccggtcaataccggaagacagcagagcagccaaagcatttgtctaatcttatttctcattcttaattgatctcacttgaagtttcaacattaaattttgttctcttagtaggctctgaccgatgaaggcaaagctgttccttttttgtttcggatacggtataggtctttcacaaatcctaccatgaatacgtgcgagtaggtatgtgtcttgatattgtttacattggattgttgcaaatcagccagatagctgaatcgcatttttgtatatcctatcggtaagtcgaccgagagcatctgccgcagtgaaggctggttgtgcagggaggtgaactttatcactccactcgaatttcccagagagaatatctcgtagtaagattgtccgtagtgcggtgagaacattactcccatcaccggtagattgacttgatagcgtaataccatcgggtaccgtttgattttcaaatgccagatagccattccggaagcatccaaattgacgtatgcccgtgcggatgccggattgttggtgttccggagattatagacaaagcctccgttggcatctatcaatcctccggctaataatttgaaattctccgtcagtcgaaactggtagtgtaatccgtaattccagttgactaatccggagaaggtgttattgttatcggcacggttatgggtataaccgatgtctgcctgaaagaaattctgcacagacacatttccatcgaataacttagtcatccgaatcgtctcgcgggaaatacggaagtcaattcctttgtattcctgcggtgaaagataggtgtcgaatacgttggtaaatcctacaccgtacatggtggcacgtgttacataccgatgggtttgcagactgtcaatctgcgcttgtaatctggtgcaaagggcgaacaggatgcatcctgtcagccccagatatattagttttttcttcatcagaataatttcatctgcccggtgatctcatcaataatatcgccttcgctcttatcactgtccgggtccagattttccggttcctcttccgggctttcctgctgctcttgttcaggttcggggaagcgggtcggttcaagttcgttgatcgtatccacggtataggtcgtgatgcgttttcctttggctttgaaccctttgacagctatgaattcatctgcatcgatatccaacggatcacggaagctgtcgtgtccgccaaatataacttccagacgcggatagtactcatcggtcagcaagatgagacggttattcttattctctcccagatagttctgtttgcggttggaggcctcgaagcagaaacgtttcaggtacgggtaattctgttgatcggcatcataaagtgcagcggtccataccttatggggatcgaatttctcaacgatgctcacattgtcttcgtagtgattgctcaaatcgaagttggtggtgtagaaatcaccattgttcagtacaaccagtatggagtcgtcactttggaattctcccaggtattcgccgcgtccatcatagttgaggcgaagtatgtcacggtcgaaccagactttacgtccaccgagagtagagccgcctttctgtttcaaggatattttgtgtaccggcaagcgggtgagaattatcccccgtgcctggcgtcccttgatactgacttcgctgaagtcatgctcgaagatgatgcggcgtacacgcgggttcggcttcaatgtcactttgataatttcggcttctccgttcgggttggcactgaaataggtaattcgtgaatcgggagttcccagtgtcacatcatattcgcggtcgcggaccacggaagttacggcgaaacgttttacgtaggtcgttccttcttttccgtcgcggtaggctacgttgtagattgtacgtttatcgttcttcttgaatacattgacataaagaacgttcttaccgacaaatttcttatcggcaacgggggtgacgatatatttaccatcacggaagaagataatgacatcgtcgatatccgaacagcaggctacgaactcatctttcttcaaggtcgttccgataaatccttcttcacggttgatatagagtttctcgtttgcttctactactttggctgcttcgatggtgtcgaagtttcgcaattccgtgtggcgcgggaaattcttgccgtatttgttcttcagcatctgataccagttgacggtataatccacgatgtgagccaggtggttatcaatctcggcaatttcctctttcatcttggcgatcagttcatctgctttgtctgagttgaatttcaggatacgccccattttgatttccatcaacttgagaatatcttctttcgtaacttcacggataaatgtcggatagtaaggtgtcagacgttcgtcgatatgtgcacaggctgcatccatgtctttggattgctcgaactctttatccttatagatgcgttcttcgataaatatcttttcgagagaagagaaatgcagggattccagaatttctcctttcttgatttccagctcctgcttcagcaaatccatcgtattgtctgccgactttttcaggactttgctcacagtgaggaaatgtggcttactgtcatcgataatacagcagttgggcgagatacttacttcacagtcagtgaaagcgtacagagcatcaatcgttttatctgatgaggtgccgggtgcgaggtgcactaatatttctacgttggcagccgtattgtcgtctaccttacgaattttgatctttcctttatcaacagctttcaggatagagtcgatcactgtcgaagtcgtctttccgtatggaatttctgtgatagcaagcgttttattatcaatcttgttgatcttggcacgtactttcacggctccgccacgctctccgtcgttgtatttggctacatcgatagagcctcctgtctggaaatcaggatatagttggaattcctctccgcgtaaatagctgatagaggcatcacaaagttcgttgaaattgtgtggtaaaatttttgaagaaagtcccacggcgataccttccactccctgtgctaataataacgggaatttcacaggaagagtgaccggttccttgtttcgtccgtcataagaaagtttccattcggtagttttgggattgaagacaacatccagcgcaaacttggacaagcgtgcttcgatataacggggagcagctgcgccgtctccggtgaggatattaccccagttaccctgacaatcgatcaacaggtctttctgtcccaactgtaccagggcatctccgatagaagcatcaccgtgagggtggaactgcatggtgtgtcccacaatgttagccactttattataccgtccgtcgtccagacgtttcattgaatgtaaaatacgtcgttgcacaggctttaaaccgtcattgatatgaggcacggcacgttccagtataacgtatgaagcatagtccagaaaccaattctggtacatgcctgttaactgatgctttacgttttcgtcccgcgtgtccgccggtttgtagtctgaatgtccttccgttatctcgttgatttcgtcactcatatatcaatcttcgctttgctttaacaacaaattatcttcctgaacatcaaaaaaggggatgtccacgcaaaaatacgaaataaattcatatgaggacgaaaagaactcacgttttttatgatactgacagttctgttaatcctttgatttcacattccataccaataaagcaaaaaagacggagagtaatgcggctccgatccaaaaaatattgatataagaaaagtcatagatttctttgccatcgacaatgcttttatgccctcctatgagaataccgctcataatatcctgtatacctgccccgatgtaactggcaatacctacgattcctaatgctgcacctgaagcgttccggggagcaatgtcaactgccatcaatccgcccaagaaacagaggagtactccgatcgcagtaccgaacagtaccatggataacgcgtctacccaaaagtggacacccggaactaatagaaacagacaaagtgccattacattcatcagaccgaagatgagtgcaggagcatttctgcgcccactgaaaaacttgtcggagatgacaccggaaaacattgtaccgataattccacaaaccgaaccgatagaaatgataaaactggcgtccagtgtagaatatcctttctgggtttccagatagaagactccccagctgtttacggcatagcggctgacgtacatcaatgcactcgaaatggcaagtatccaaattgcgggcatcattagagcttgccgttgtgccttgttgaaatcggcagcatcacctgtttcactttgcatttgtggatgattgacggcaggcagcccttcactttccggagaatcatgaaagaatctccagacgattaatgccccgattattccgatacttccggctccaatgaaaccgtatctccatcctaaagcactgacaatggaggcgacaataatgaaagtcattgcttccccgatgttgtggcttgccgaccagaagccatagaacgatccccgtttcttattttcaaaccaacgggataatccgactacgcaagaagcagtccccattgactgaaaccatccgctgattccccataatatggcgaatagaatgaaagagtgggtgaatcctaggcataagtttgccagggctgtaattagcagtccggtggacatgaaacgcctgatattgctgcggtctgccagaaatccgttagtgaattttccgatagcataggtgaaaaataacactgctccgataataccgagctctgtttctgaaaagattccttcttcaacaatcggtttctttactacattcaggcttagccgacagacataataaataccatatccggctgtggcggaaagaaaggtagcccactgcaatcttttaagttttttcttgtcttttttaagaggagtcgcaggagtgctgatgtgataaaatttgataagttgttttaacatggtggtaggatttgatagcctagtgaaaggcgatagtaatgggaaggtgtatcgattatcttccgatacaccttctgatgaagaaataaataaagagttagttagtagcttagtccatcttcccaacccggattttgggttagaatgccttgtgtaagtacgcgctggtcagcagggataggccataagtagtctctttcctctttccagtctttgccataagtaactttggggaatccgataatataaccggatgttccgttggagagatagatgtccttatccagtttctttttattatcacattgggaggtcgctgtggtttcgtagatttccagatcaggcttcccgtcaccatccatatcgtatgttcctactccgggaacataaataccgtagtaaggtacgtaatgattgaacatttgtttaccttctttccaacggaataaatcccattgtctcaacccttccattactagttcaattgtacgttcgcgacggatttcgagaatgacgcccttattcgttccctgctcaacattcggatagcaagctgccagataaggatcagggttactgttggcatccgtaagattcagatccggcattttagcccgttctcgaattttattgatagagatatccaggtcttcttgtttgagtgttcccagttcggctttggcttcggcataattcaggtagacttccgctgctcgcatcaaaggccaatcggaggtacttttagcggctccgtcatgatctttggtacctacaaatttgataggtctgtagccgcaataagcagttaagtcattggcggtcacggttgtttctcctttttggatatagttcggacaaagtacggtttgttgcaggcgtggatcgcggtttttcacctcgtctgtgtaaaacattgtttcatatccttgtttatcagtgaaacgtgttccgtccgccatcaggtagtgattcataaaccggcgggtaaatcccatttgcaggttagcgatgctgaattgtacggagtgtgataattgcaaaccttcgaagttataagctcttgccagtacgacttctgtggttttggcgttgtcggcacagaacatatctctgtaaggttccgttccttctttatacaggctgaagccgctttcgtcaataaactgccgggcagtgcttgctgcaatttccaggtatttctcataattatccagtccatggtatttccgataagtcccttcataaagtgcagcttgactggcaaatgccaatgccgcccatttagtgactcttgtgttccgagtttctgtgcttttggtcggcaaactggtagcggcatcttggaaatctttgagtacttgattcatcacaaactcgcgggaatccctggctttgactaataattcctgatcttccgaacccagcacttgatcgtaccagggtacatctccataacggcgtacctttacgaaatagaaataagctctgaagaattgggccactccattatattgattgcgggcggtttcatcatcacagttggaagaatgttgcaggaagtaattaatgtggcggagtttggtccatgaccatccggtttcgctggcagccgaacgggttccttcaattacctgtcccatgcctttgtcgatcatatcatctgcatttgtaccggctgaagcatctggctcgtccagtaaggtataaaattgattggtccataattccagatcggatttgttttgaaagtaattctctggtgtcactgcattttccggtaggagtgtcaggtcacagctattgaatagggctacggccattcccagaattattattttgttgatagctttcatactatatctgattagtcattaattaaaaagttatatctactccaacagtgtaaacacgcgggtaagcatatcccgaacccgtgttggatgagtaagtgctactggagattgccaattccgggtcgatagttttgttatgcttcttcagaggcgaccaatagtatagattttctcccgatacgtaaacacgaaccttttcaaaaatacgtttactgataggcagtgtatatccaatagagagattcttgaaacgcagataagcgatattctgtatatatcggtcgtttacggtgccgagtgaaccgcctgaataggattgataacctctgatacgtgggaagaaagcatttctgttgtcttctgtccagcagtcttccggaaatgatttttctacaaatgaggtagaagggaaagaatatggtccccagaatgaatttgctccctgtgaggtggtactataagatgggtaccagtctcttttaccaattccctggaagaaagcggatacgtcgaaaccgttccagctcgcatccagacggaaagaataactgtatctgggagttgtgtttccaatgatttgtttatcaccaggatcgtctactgttccagctccggccccaatcacattgtcaccgtttaagtcagcaaagcgtacgtcaccggcacgcagataaccgtcgaccttactgctataaacacgtccgttcacgactttgtcattgatctttgcctgatattctgctgcttccttatctgttttgaacaatccgtctacatggtatccccagatttctcccatcttcttgcctacataatggtcggagatcagtttgtccggattattgtatttggtgattgtccgttggtaatctcccaatgtagcttgtattccatacctgaaaggtttattggccactttgaacgagtcgttccatgaaacggataattcccatccgtttgtccgtaagtcggcacagttggcttttggggtggaagcaccgtatacatccggtaacgtcaatgaagtagttagcatatctgttgttttacgaacgtaatagtcggcactcatacttaaacggtttctaaggaatgacatatccaatccgacattgtaggttgtaacggtttcccaagtcagtccggaagaaatcgggttggaaatctttgcgtaatatgctttgccttctccgtcgaaagtatagctgaactgattgtccgaagtgattgtctccagataagcgtaataatctacctgctggttccccaggctaccgacggatgcgcgtaacttcaggctgctccaccagtcgcttaccggtttgaaaaagttctcttcggagattctccatccggcagatactgaagggaaaactccccatctgtctccttctgcgaaccgggaagaaccatcggcacgacaggatacttcgagcaggtatttacccatgtaatcataattgatacggccgaagaaaccaagcgttttataggcgctgatatcttgtgatacggtaagtacactttcaggagttactgccgagaaggagtcgaggttatcattggacaggttagtcatagaagtgtttttgttgacattgcggtaagtctcatactggctacctgccactattttaagattgtgtttctttgcccatgaatgttcaaatgttgcataatagttcaacatgtgagtaacagggaaagattcgtcttcctcataattattaaagatacttccggaagtgaaagtttgtgtcactccctgactgcgtgaatactcaaatgaattgttgcgataacggtacaattgctttctttgttggtaactgtagttggcggtcagagtcagtccctgtagtaacgtaatgtcaatctgattgacaacggacaagagtgttctggatttgctgttatgacctcttcgtgacgttaggtatccgccgtcaccggctcccaagggagagttggcataaagttggttggtatattgcacaatcgttccatccggattgaaggggacgaatgagggactgatatttgattctaggcgggcaatagtcattgcgtagttggaagtaccgttataattgtaattgttattatccagtccgatatttgtcgaccatttgatccatttgtttagttgagcatccattttggcacggaacgaataatccttataaaggtctttgtcgatgttgaacataccatattgctggtagtaacgtccactgatatagtaattcaccttttcgccacctccggtgatagagacattgtgttccatctgtgggcgggtacgattgtagaagtatccataccagtccgtatttccataataataatatttcccgtcttctccgatttccacccatggacgttccggattctcagtcatatcattccggcggtcatagagtttctggagctcttcatcttcgtacaagtacatattcacgccattgtatgcatggtagaacttgttggcgaaagtgacataatcgtatccggtacggataaaatcagtggaagtcgtgttctgtgtccatccaaatcgaccgttgtagctgattttggcttttccttttgttgcagcacttcccgatttggtggtgataagtaccacacctgcagaggcctttgctccataaatggcacatgaagatgcatctttcaatacggaaatcgactcgatgtcatttgcattgacttggttcagtggaacttctacaccgtcgcaaagtactaatggcgtaccgccattgacagagatccctccgcgaatgtttaatgaatagccggactcgggagaaccggtgccgaaagtcagatttacagacggatcggctccttgtaatgcattggcggcagatactaccgggcggttgttcagttctttgcttgaaatggtggatacagcacctgtcagattacttctgcgttggctaccatagcccactacaactacttcgtcaatcatcagactggaaggtaccagacggattgtcttagtctgaccgtcttttacatgaactgtcgctacctcatagcctacatacgaaatatcaatagtcgaaggaatggaagtctccagagagaactttccatccaagtcggtaattgctccctgtgcggtttctttgttcatcaccgaagcaccgataacgggatttccttcttcgtcatagacaaccccggtgattgtctgcttctttttctcatcggacttttgctggctggtatcggactttttactgatgatgatgctatgtctgttgatggtatagctaacattctgtcccacgaatatctgatccaaaacgaccttgataggcgcattattggcattgattgacaccttcttactcatgttgatctcggaagatttgattacaactgaataattcttggtcttatgtaaagcttctatcgcttcttttacagtaacattctttaattgtaaggttatgtcttgtgctagaataggttgagagaaaaatatcatcacacaagcaaaccagattgtcgatatatattttttataaatattagtttgcttcatatcaggttatactactgctaaatttatggagttgcagaagtaatcatgattacttcctgactccgggttatggacatttgtccgtctgtattgagattggataaaatctcgtcaagagtttccccgttagtgaaataagcaatgtacgtgttgtcgcttaacttttgatctaatatgatgattctggtatcgaaataatattccagttccttcacaatatcactaaggggaagattactgaaatagaatccttcgctttttgacggacacttgtacagattggcaaggaatgtttcacgaacaattttctgtgaggcacggttgtactggatcatttctccttttttcagaatctcattaggatgagtcggagttttgaacagtaccgaaccttctacgagtgcgacttctaccgtctcaatattctcgtaggcacggagattgaactttgtacccagtacctgcacatggacgtcaccggcagaaatgataaaaggcttgtccgggtcctttgccacatcggcaaagagctctccactgacaaagatttctcttttatcttctgtgaagtcggaaggataaataacccgcgtgcctgaattgacgtggagcttcgttccatccgaaagagtgagtgtttgatgcataccgtgtggtacggtgatatcattccagtgtgtatttgccttcttgttaagaagtaaatatccggctaaaaacaaaagtggtataaaaaggacggctgctacacgctgcatccagcggattgagtgctgaagccttgggcgtagtatgcgaacctgtttgggttgaatagctttttgaaatttctgaaaggctttttgagataactcatggtcctctatttgaatttcagagataatctcacggaaactctggtccatcaggttattgtcattttctgtcaaccacttttggatttctatttcttcctcgtgagaacacttatcgtagaaataatcttttaatatgtcgttagttatcttcatagcgtatttgtttaaagtacaaaaatgcattttttttctttatctgtgagtatattatgttgattatttctgaataagatattctattggggatagattcgtattcttaatctgatctcatattcataagcacttgtttttatttaatatagtgaagtcagaaggagcaatataaaatttctcatgtttctttatctgataaatagagtaataacttcgagaggctaatcgtggcgtccgattttcttcaggtagctgattaataactctggtcggtccgtttgtatgatggatgtaccgaaatctagcaccttttggtaaacttctgccccgtgttcaaaagcgtagtcatcgtatataccagcttcttcacctccgcagagcgaggcccaaagggtgtttacccagattttggaaccttgggcaaggatatccttcatacattttcttacttccggagtttcttgttgccagcatacttcataagccaaagggacgatttttttgtccatatattggcggaataattcctgtccgcttggtttgttaatatcaataatgggcatgtacatcatagcgtgcttatacttctttgcctgtgcatctacaaaatctaccggttttttgcctttaatcaggatttgttctgtgactcccagttcttctgtaatagccatcactaaatcataatattgatacccttggtctatattaaccactatacggtctttgcaaacagccaatgcttcttttaaagtcggcatcttgtatttggtagggcagttatgtccagttttcaggaaacagtttttgatataatcgtaagttacgtcgctgactctgccttttcctgtagtagtccggtcaatggtaccgtcgtggcagaggacaagtacactgtcggctgttagcttcagatccagttccataacatcaactcccattcggataattgattcaatggcggggatcgagttttccgggtaatctctccagtctccccggtgagacactactactacatagtctgttttcgggttgtggatggcttctactatcttttgcgcatttgtcttgcccgaagtgacaggagtggctgcaaaagtgcttagagtcagcaagagcagaagtccggcgaataaaattctttttttcatattcatatcattttaaggattaattctttttgaataaaagagggcgaagcacaagatgttgaagatcgtaggctgtgatgatgacatggccttcgtcaaaatcattctcgaatgtcactgtaagagtatgagtctctttgtcgagtgttgctttaacgtttactgcctgagcaatagtaattatcgcgtctcctgctgatgttcccgtcacttcatattcaattttcagaggactggcaaggtcagtcaccttggtaaccgcttcagctttcaacttgagattcagtgaattgaatacttccaatgtaagggtttctccgttacccaatgtgatattgagatatccatcgtcagttttggatatattcttaaaaatggcagtcgcgtcggtggtagctgtaataggagtgcctttgctatctttaaggacttcaccgttgactgtccagtaaccgtcggcgtttacccccatttcgggggtatagccgcagactgggacttttttcccggcatcatcagtgagccagtttgtttcattgtcaatggttgtagtccaataatacaattggtcatcatcgctgaggcgtacacctagtatcggagcttctattacatcttcctgggttgctacgacgactgctttttcttcattattgctatctttgtaggtaatgacatattgtccatccgagttccgggtaacggaggtgataacatttccttccgtcagatagctcagctttgaaatatcttcgttgagtttattcgcttttgtttgaagagcagttattcgctctttgaaatcattgagcttattctgaatcgcggagtcgtcataatccccacaactggttagcaggagggaaagaagcaacgaacagaaaaaatatattcttttcatatcttgtgtcttttagaaattaatactgggatcgaaattctggtttgcatggcagaatgcattctcgttggtggcatccggtgcagaagtgggatcgtccttatacttgctgtaatcaccgacataacctccgcatacacaagctttgcaattagtccaggttgcagtagaagcacccgaataaccacataaccaccccggaccatgtctgttggttccatttccttcggtaaatacatctcccagaacagcccctttgtttacacagccgataatctgtatgttggagtgaccgatgatacctccggtgcggacacttaggtgagtcatgacatttccataatttgtgcaggactctactgtacattctggtttcgttttcaggtcatccgtacctcccacaattccacccatacgtttgtaattgtaggttatgctcgcttctttaccttcgaattgtcctaccttatcatcttcgatggttcctctattgtcgcagttgtaaatgttgccatacatcagtgttgctacaattccgcctgttcttccactcggacaactaatatcaccatagttagtacagtaattcagtttgccaccttctgctttagccatgaaggcgcagattccggcagtctgcatgcccgtacctccattgcctgtattactgatgtgtcctgtgcggacaaatcctctgttggcacaaccttgtgctttggattctcctccgatcgtcgtatttataatagcacctaccagaccggaaagtgcgttaaattctccagatttattatcggctgtgaagtcgatattataatagttagtacagccctctattactgaatttttggcgaagcaaacaagaggagcgataacagtatatttaggtgctgttccgctcatgatccaaatagtagtggtaccagcatctcctaaagccaaattcttgaccgttgcgttttctattgaaccgaacaggccgtatgccagccctccgttcgttatatctgcactgcaattcagattcttgatggcgtaaccttgtccgttgaaggttccggtaaacggatgtacggaaacgtaaggttcggcagttgtatagttggaagcatctatgtcgcctatcggtgtccagctggtcacggatgacatatcaatgtcattcagcaaaactacttctccggcatcattctgccaacgggaagtatttgttccattattaacggctttcgcaaagttaaccaaatcagtggccgtactgattcctcccttagcttccacttcttttgcttcctgtatcacatcaatgcttgaagaaatattatacagcgagttggagaatgttatttttccggtacgttcgtcgcctgtttcattggccagaatggtgaaagcgtgtgtggttgtaaccagtgcgcgggtcccgttgtaggtgatccactcattttctgtattgacttgataggatatgttcgcagatatttgcatctcaatattcatttgtgtacctttaagttggataggtcctacatgaccttgatatattggttcgtccagaatagcagtaccatatgtgaagtatatcggtttcaatacggtattattaccagcacttgccagtaacaggatattcccttcagttgccccttctttcatggtggcgataagggtggaagagatcttgtctattttgacttccatattgtaggcagtaaacaagtctacatatgcattttccgactgtgtaccatatatttcgtatgggatacttacgggagtggtatagtctgttactgcgttgtataccggactgttgaagcggatgctgagtgcttcctgcaaactcatccgcaattcctggccgtctgccagaataaatacggcttctcctgttttatcatcgatataggctgatttgaataacatattacttaaatcattagccaatacaccggtactactaccgttcacactccagtaaccattctcgtttattttaacgtcaggcatcgttccgccaatcgggaatttctttccgtcaccgtcaaggatgaatgtgtaagtcttccccttatcagtagtctgtgcccagtagaatttaccgtcactatcttgctttgctgtgatgattgggaatttgataacatctccttgggtggcgatggtaacggtgtgggtttccccaccaccgtcgctgtaagatattatgtagttaccatcagcatcctgactgattaaagtgataaacgaacttccgagcactttggacagtgaggccatttgtgcagtcaatgtttcggtttgagcttcataatctccaatcgttttttctatttcgttgaggtcctgccaaattcgttcgtcgtcgtaagaactacaacttcctagaaagcaggcagatataaataatgatatacttataaactttttcatatattcagtgattaacattcgtttgattcattattcaagtactctgacatgcagatagttcatgcagcttctttcaccattcgcatccgacacatgattgattacatttccgataccattttcataggtccacattaccgtagaacctcctccatcgaaacggattacatcatataaccccaactttttgcagacacgataagcttcataaaaatcaagtcctctgtcgttatctgttcttccgtctacacagaatataattaccttcgatttatcttgtgtcattccaagattagtagtcgggttgattgtctctgcatcttctttcttgggaggagcggagtatataccattgtatacgtagcgatacatgctggaattatgtactttaatcggatcggtagaactacctattttaagttcggcactaatttgtactttatctcctgttttcagactttgagccagttcattggctttgtcacctgtcacttgcaatacccattcatttttatctattacgtatggagcttctacagtagtgcttcgcccgtcaatgatttgggtaattgtagcttcaaaatcaccggaattaaccttcaatggttggttatttttgcctatgataaacaaagctttggttcctattgggttggtcaaccccggatgaggctctttcacatatctgaaagtatataaatttgcatcgtatgatggcttgccattcaagcggacaatggtgtcattgactgaataatattcatattctttggttccgactttcaatttaccagtaaagtctctcttttcgaaactgatggaacggttatcaaagaaggtgaatccccagacatgattggtcaaagtggaacgcacatacggattattgacgaatacaggttctccttcttcaatatgcattcctctggggaagccgtcgtgagaattgaaaaagccggtattgatacctacgacgatatttcttccttctcctcttcgtctgacacaagtctctgacaatgtttcgcgaagaattttaccattattagagttgttgttaccattaggattcgggcagatctcatctgccatgactgtttcgaacgtcactttcggattgttcatatcaatctcgatagcatagatattctgattgaaattggtgaaagaatagtgtttgtatacgatacccgatgccaattcgcggtcttcggtcacctgccagtcatagtatgcttcatcctgattagagaagttattagcttctttggagaaagctccgtggcggacggcattgctgtaagtggcaaccggagcatcttccggattgttcttgtaaacactgtaatctccgattttgcctccgatgtggcagtctgtgatatagtctgtgccagtttttgtaccgctatagccacaagcccatccggctccatgtttgttggctccgtctgcggttgcatccgacagaatgattccgttgtttgtacatgattgaacaaatccggcgttgtgtccgacgaatccgcctgcacgacttccattttgagagtagacgtttccgttgttaatacaattcttgaggtatttatctgtgttgattccccctgcaagtcctccgatacgtttcacattatatcgtttggagtttgaggcaaatacatcgttcacgtcatcctgaataagtccttcgttagtgctgttttcaatcgttccttcctgtaaagttcctacgattcctccgccacgtccggaaggtgcactgatatttcctttgttgattgcatatccgatataggcttcatcaatttctatatatcccgcaattcctccttggttgaaagcggaataggccccggagcccgtgttgacaatattgccgcaagtcaggttgccttcatttatacagccatttgtttgtgttgtgtcgcctattttatttccatacagtacaccagccaaacctcccattcgaacaccgatattagcggcgtttgttccttcaaaggataagtttattttattggtgcatgccagtatgcttccttcacaatagcctaccaatccgccaatagctgccccttgcggagctttacctgtaatggtggcattaccggaaaccactaaatttctgataattcccgaactgccgagtgaattaaataatccgtgggcgatattgccgtcttcaagattatacgtacaagttaggttgttaattgaatgtcctttaccgtcaaataccccgttgaaggtttgctcgccgattgtataaactacttttgtattagcactggtagtattacttgtaactttacttcctacaccgctcgtcagtgtaatatctttcatatcgatatcattcagtaggattacgtttccttctgtgtctttgaatttacgtaaactacctccattcgtgaccgcatctataaatgctttaaagtctgttgcagtagcaatgcctccgttttcgacgattggtagagtaaagcgtaccggcttgattaatacattatcttcagtatcatagagcataatcatggttactccctcttcaaaatcatcggtaaaggtaacagccagtgttttattgctgctattcaacttgacttctactccatcgtcgctacgtgtgatgagcaccagtgtttgtgctgcctttttcccgataatattataatttaaggtaaggcttttcgttccttcctctataataataggagaaatggcaggttgacctgcatttttaaattctacattaaatagcgtaaaggtactgaccgatagaatttctccgttgcctagtgttattgaggcagttccgttatcgttcatttccactttagtaatcagtgaagccgttttaccttcggccttaatcggcttttggttactgtcgagaatctgctggtcattgataacccaatatccattctcatccactcgtatttgaggagcgctacccgatactgggattttttgtttgttggtatccaacaggaaagttgtttgtcctttggtggtagtagtccagtaataagttccggcttcttcttgtattccgataatcggactggaaaccatttgatcggtggtagcgatggtgaagctatgctctacattgtcacttcctttataagaaatgacataaccgccattagcagcttctgtgacagaggtgattgctcctcctttcacaatttggctcaacgcattcgcttgtagttgcaaactgtttagcttctctttcagttgatcgagatctttgtagattccatcaatgtccttccaggcagccgagtcatcatagtcatcggtgcaactgccaatcacaggcatgagtagcaagaataaaagtagaaaatttctcatgttttttaaataatttgattcaatggttaatagcgcgctatttataactcgtttctataatgaagaacacatcacttggagggggtacgtaatcggatttgaactttttttttttaatcatcactattttcaataagacttgaatttttcatattaatttcatagttttgtcatcagaagcatactatttcctgtttactcctcccttacatattacaatatgatgtgattttaaatagggtttggtatatcttctatattatcctcaaatccgcaactaagcccttgaacgtccttattgcgtttacacgtcctctcattactgaatttgcagataatttgaacttgaagcacccacttctgcctacaatatccccttaccccacaatgtgacttgaggcaatacacaatatcattcccataagttgtaggcattatccaaaatcagtctggaaaacatctgcgtaagcattattacaggtatagatgttcagcacataccgccttgatgtcctgatccacttggctggtacagagataaacctgaagacaaacgcttttatgcgacttgttgcattgagcccgaacttctttacgtcaagtctttgaataatggccttgtaaaagttacggataagtgctgtaagaagaaggaacactgtgttctctgccatgaaggatttgggcaatctgtcccacccgaaaccattgttcatatcatcgaagatacgttcctttcctccacgaaggttatagaactcgacaatttctcttacggaagaatcatagtcgttagtcaggatacaacggtatgtgtattctccttcccaaaaatcctgcacaccatccatccgtttctgtctttgaatcacaagtcgatatgccttacctttccacttctcaacaaggatagagttcaattcaaactcaatgccattgatttcctcagttttccagcctttgagagcaaaggtgtcattgtagatcgaactgcagcggttagcacggatatagaaggacttgcagtgtttttctatttcctccacgatttcctcggaacatgatccacaatcagctctgaagcgattgatagtgagcccattctgttcaaatctcgcaaagaacctcttcagcgtgtccttctgatggaaacgaacatttgtgttaccatcgctattctctataccgactatcaaatcgccaataaccgccacgccagggcgataaccaaggaacttcttgtatgtaggctttgcatcatacttctctgtctctatgaactgatggtcgaaatcaacatcatacatctcaccctctttcagttggccagatgcaaatatacaattgagcaataaagtattgagagtgtcagccgtattgaaatcgtaggtcttgcccatatctgatgtgtatgaaatgttttcttgcgtcaactcctttatcgccctgaggatagtatcagagctacaagtgcgaagtgtcggatgaagcgagaggtggttcatcaaatgagtagtgacatcctcaatacatgaaccgctacagaagtagatactcatgagagaacggatgatttcgctgtactgataaccgaacgatctacaccttagaccgagggttgagtcgattacagatgataatgtggagtcaaattgctccatgattgaaaataatcccccaaaaggagtgagtctctcagatttaatttgtatcttcgccatgtctatcgtcggattctcttgttttttttgcaacactaagataagtgaaaattctgacatggcaaaatcctgagcaactttttgttgctcaggtacttaaaaagtttaatttataatagtgttgcggaattaaggattatttatagctttgttgcctagaaatctttttcggaataaacgatgaataaaactgatttatcttctgttactgaagaacaactgttgttacggcagttgagagaaggggatatggggagctatgagaccctttttcatcgttattatcccaccttttttgcttttgccagaggtatgctgaaggatgcaggggcagcagaagatattatccagaatgtatttatgaagatctggatacatcgtgaagctttggatgaaacgatgtcaatcaagaactatatttatgtactttccaaacgggaggttttcaattatcttcgggccaaatacaatacccatgttgtgttaacggaagacatgatgacattggagcaatcttcaagtacggatgagccaactacagactatcgtgaattgcgtgaagcagtacaaagtgtgattgatacgatgccgcctaaacgtaggagtgtgttttgtcttagccgtttcaaatccctgactaaccaagagattgctgataaactcggtatttctattcgtaccgttgagaagcatatagaattggctcttcgcacttttaaagaacagttggggagtttctttgctctttttgtggggtggttcctttgaatgaggctgtagcgactgcaggggggctacttgtataacagaaagagatatggtatttgaacaccatatctctaaataacttattaaaagtgagaggaataagctgaattaaactcgtatttcccatcctttttcatactctcttccccagagcttattagcctccaaatcgttgagaatacggccgcttcccggatcgatttgtaatgaatgaccgacgcgctgagcgatattacccaattgtactagctgggtactgatacaggcatctacaattccggagtttaacttagtacctttgcggatagcatcaaaccagttccggaagtggaaagagtccagcttttctgaaggattcaggagatttccggtttcaaacttcaaatcactctttacctccttgatcgttttgcctttgatatctgctatcttatattcgttaccaccaccaataaaaagagtgcccgtatctccatagaatgcagtaccgactccatatccgtctaccggcatcgtattgcaactacgtccctcccaggagaaagatgcttcgtcgccaaactggaaagtgataagctgtgtatccggcgtctgccaatcatcctgaaaacgataacgtcctccgattgaatctactttggttggataatccacacctagtccccagcgaagcatgtcgacaaagtgagtaccgttatttaaagcttctccagttccccagttccagaaccagtgccagttgtaatgaatgaagttatccttgaaatcgggtacacgaggggcagggccttgccacaaatcccagtccagataatccggtacgggaatgactttacctgttccgatagaaggacggttgttgacataccatgatttggcatatctcacttttccgatggtgccggacttgatttcctccatcgctttgattacattcgggaatgatctgcgttgattgccaacctgaacgattcgattgtattttaaagtggctctaaccaacatttcattttctgccggattgtggctagttggtttttccagataaacgtgtttgccggcttgcatagccataatggctgctttagcatgccaatggtccggagtggcgattactactgcctcaaactcattggattctaacattctgcgtatgtctttttctcctttaggagtccgtccggtcagtttgtgaatcgcagcctggcatttttcaagtgctcttgagtctacatcgcaaatgtaagttacttcacaatcgggttgtttggcaaatccttgcgcgagagcactgcctctggaatttacgccaataactccgatacgtattttctcattagctcccagaatatcttgatatcggctggaaccaaaccctggaagtatgcttcctaaagaaagtgcagctgtacctgctactgtttttttgatgaaatctcttcttgttgtcatagtatctatttttctccaaaattaggttgttattaggatatgtgaatgagtatttccgccaattctccctcaaaaaacgtaaatttcttatttttttcttcggaaaagacggatcaggacgctaagaattccccggggaatccataggatgaaataaatgaaaatgctgatgacaatcacatatccgatttgagaaattacttcgatccatggtcgggaatagacaatgattgcaataacattgacgataaacgcaagtatgaaacttagaagatagatatttctttctcgtttcagcttttgggatgtgatgataatatctttcatggtttagaatttcatataaggtattttatattcgtcaggaaagaatatgtggcgttgttcttccatggcctgatttccaagtaaacaaagaaccgttgaacaatatgcttcttcaactatattctgtgctttctctccggtgatacatgactggcagaaagaagacaggataatgtccgaaccgtctttgtctgctccgatcatactcaatccactgtttacgtggatatctccatcaatgataaagtgtggtgtgtactccatttttgtttctggtctccaactaggacctgctgtcgggatggcggcaaagaccttgtcttttacctggtcaatcagttgccggatacccgaagttgaatgatcttcttccaaataataaataccttttgccatttccacggttcctttacttcccagaatttggtcttccattccgttgaacttattggaaatcattgattcgtatgcgatcttaactccatccgagtatctgtaagtgacattgacgctatcataaacttctcgtccgtctttccagtatacaatgtcacccattcccacaatggattctggcatttttttggctgcccagttacaaacttccaactgatggcatgctaattccgtcattaatcctccggagctctctttgtataatctccagttaatcttgcgttccagctctggtgaaggaaccggacgacgccagtctgcattacggaaccagtgacagcgaagacctaccacatctccgatgagaccggaatggatcatctgcattcccttgatgtacttctcgtcatacattcgctgcatacaaaaatagagaaccttgtctgactggttgtaagtgtcatagatagctttgcactcgtcaagggtacgtgccattgctttctcgcaaaagacatgtttgccggcagctaatgcgtccaatacaataggtgcatgccagtttagtggtgtggatatgatgactccatcgatgtctttcaattccagtagtttgcggtaatccgtatatggctttgcatccggacaaagttccaatgcttgttgaagattgggggcataattatcacatacggcaacaatttgtgcatgaggtatttctttgaggttatggatgtggtattgtcctctggacccggtaccaatcaaagctattcgtgctttctcatgcttgatctcttgtagtttctccggagtacaggaagtcagccaaggagtggtcgccaataatgcggttcctccggcaacgtatcctaggcttttgatgaattgtctgagtcctaagtctactcctttttctttatgttctttcatatcataaattgtatagggttgcttgtatattattgaacttttctgaaatctttttttgttcctgttcattggcaatcatccagaccgtactaagaacttcggcttccaacgggtcgggggacaggatagaacttgcttttcgttgttcattaaatatgcctgtaagcggattcataatgtgtccggtatattgtaacgtattaccggaagtggataatgttgtatcctgcagatcgaattcttttagaagagactgattgtacgggttcagaaaactgactttccaacaatctccataaggatgatgtcctatacccaggatcgaactgtttccaaaattagcaaatgcatcactaatattctcctgttcaatgaattttcttattttcttcaaagcatatcctttggcaaaacctccaaaatcaagtgaaatatcaggagatgtaaaggagatatatgaatgttcatgaagttgtatttgggagaaatcttttaatgtaatgtcgaataagtgtgaagtggtctcataatagtatgagcaaagctgtaagattgatttcatctctttactgatttgaatcttgctttgagaagcatgattattaatcttggaaacttcactatgaggatcaaaacgatttaatattttatccaatcgctccagctcataggcgatatctgcccaaagtgtattcaatcggtcgatatcggaatgaatgagcaggatatcgaatcgggtccccatgatatgaggaatgaagccatgaaacatggcttcattttcataatatttgcatcttgtttctaacacctattgttttgtttatttgtttcctttctttgccatttctacagcagtagtagtaatgtaatatttagctagtgtattttcattttcccattccggcatatcctgattgtgtacataatgcaggaaagcctttgccactttgctgaaatgttcttcgtgtcctaatcgtttttcctgtggtatgtcaatcagataagttccattctttttgtttttgacagataagaacggataagttatttgaagctgttccactgttttttgcaattgagcttcaaatgtcctattgtcaatgtccggttctttctgtatatatagctcttttacaaatccatttttttcatcctgaacgatttttaaagtggctttacttcctttctttatggaagtaaatgtatctcctccgttagtgggtggagtataatgccatgtgacttttattcctatacaaatccctttaacggtatagttgagacttccgtttgccatcacttccaatacatcgttttttatgtatcgattaagataagcgggaaaagaatcgacttgtgtcgattgactgaactctgctaatgtaattggagttgcccagtgtttggcggcattcacggtgacatccgattgataatgaatcgttttatcaggaaaacattgccagttgataagatcgatcagatgtgttgtaacatctgcaatcccttctccttgttgctctacatcataataccatgccgggcgaattaatggcttgccagaaactgtcttgaaaaaatgatgcacgctttccattatgacagatggattgtccggtgaacctttttgtaaatctccgaataattccgtctgatgcaaaagctctttttctatgatattgaggatatcataacgttccgtcatcagatcgtataaaagaagattcttttctttggcgagttgataggcttctgtcaataacttgaaatcctgtggattgatagccagtggcttatcggcaaggacatgatatccggctttgatagactccatgatatagcgcgtctttttctgattgtttccggccaatactgctatattacctttatgatcggcaagcattttctggagataatcatctccggtatatacttgttttttccatgtcgtaggagattccgcccgctgattataagaatcaatgctttccagatattggttgacggctattccttcgggggcatatatccggatggtgtcactgacatctgtcaatgtctctttttgaagtaggctggcatggaaatgtccgggatcgagaaccactacttctattttacatgaatcattggcttccgccttattcataatctgtttcttggagaaagaacatgaagaaactataaataagattgatataagcccgattcctttatatataaatttcattttcttatttattataggttttgattaatttccgggcgtctttccatcctttttggtaagcttcttccaatgtgacaattcttccattctcttctttactcatattggatgctttcatgaaagtgaatatttcaattgtttcttctctggagataggagagattcctgtttgaaagtatttaagaatctgttcaagaagcgctttataaccttggtaacctcctgcggctactgctccttttgaagtataggcagttccaccataaatttgcggtccttttataatcgctctgaaagttccgattctaccatctttccatcgtcctactactacatcccctctatctgaagacatccggttgactgattcgcatcctgttcccataattgtgtataatgtttctactccatgaatgccatagaaaccgaaatccggatgcgttggctccactttgtgaggagaataacaatcggctccaaggattttgccaaattctccatttcttaatttctggttttgaggagtaaatctaagagcagaagaggaaaaaacaggtgcattgtatttttctgccatttcataaatagcgattgcatctcctaaagtagctccgacaggtttgtcaatatagcatatcttacctgatttgaatacctcgacggcttgttccaaatgtagtctgccgtcattggtttccaaaaggacacagtctactttttccagtaaatctgctattgatgaggtgatttccacgccatttgctttgaccttttcaatgtatccggggattcgttcgtaactggattgaatagtctttgaaccgtacggatacgctgctactaccctaaaacctttggaaaaggtctcatccgaaccactattaatcaattcggtgaaagcggtggaatgggatgtgtccagaccaataattccgatccgcataactttttgtgcgtgtatactgaagctgatagccagtagtataagaagtgagattctgtttttcataatcctttataaattaattctttctgcactttccgggtccaaatataacgaagaattttcttttcttcgcaatatgctggccggacatttttctgaaacttcaccataaacagtctgatagactgcttgagctttatttttgaacgggacgatacaaaacatccattcagcttttagcaaagccggtatcgtgagtgttaaagcttctttgggtactaagtctagtgtcttgaagcatttttcattgacttgctgttggcgacatattgggtccagttcaactactttcacaagtttgggatcattaaagtctgctacatccggatcattgaaagcaatatgcccattttctccaattcccaaacaaacgatgtcaaccggatgcttagtcagcaagtctgcatatcgctgacattcctcttcaaggttttccgccagaccattcagatagttgactttcttgaaaggaactttgtcaaagatacgaattctaaggaaatgtccaaaactttgtggggcttccggatgtataccgatgtattcatccatatgaaaagcgtttattctggtccagtcgatgcgtttgtcatgaatcagatgactcaaaaactcattttgtgagggggcagcggcgaaaatcatatttatttccggtttgctttccaataagcgacaaatttggtcgccgacttcttttgcggctacactgcccatctcttgaatggacgggaaaattcgaactgttaattgttcctgctgaaaaactttggtcttagtttcatttagtatagataacatggccttttaatattgtattatttatatttatttgattatcaaaaatgactatgtcggcatccttaccgatttctaaagaacctttttctttgtcaatatgaagaatacgggcgggcgtcagggtcatcatacggacggcgtcaatgagaggaacaccggctaaatatatcatggttcgaaccagtcggtcggttgttgcaacactaccggcaaaagctttccgatccggcattttggccactccgtcttcgataatgactttctgaccgttgttgaggctacctaatatcgattcaccgtccggcatacccgctcctctcatggcatcagtgcagagggctgttttatcaactcctttgaacttgtatacgaattggagcaggggtttcggaagatgtatgccatcggcaataatctccactgtcatatcttcaatcaagtaggcggcttctactactccggcatagcggaaagcatttttgcgggtcactgatgacatggccgaataaaggtgggtcacatgtgtataacctgctgtaaaggctttctcaacttcttcataaatcgcgtcggtatgagcgatggagggcagaatatgatgttgttgcagagtttgccctagtgctagagcaccctccaactctggagctacgctccaacggataatatcttttgaggcttccagaatggcattatattcttctgcttgcggctttttcaggaagttcgggtcttgcgcaccacattgtttcggtgaaaagtaaggtccttccaaatgtaaaccgataaactgcgaaccattgatattcatttctttggctttccgatatacggtaaacgtcgtcattaactcctcgttagtgctagtaagtgtggtgggaaccattgcggtagtaccatacttggcatgtgtctcggccactccgagaaaagcttcgatagtaccatccatgaagtcatgtcctcctcctccatggatatgcatgtcgatgaatcctggtgaaacataattctgacgggcgtctattaccttgtcaccgacgagcggctgatagcttccattgggaataatctgctcaatttttccattttcgcatatcaatgtttgccccatttttatgcctgttggtagaatgagttttccatttgttatgatgagtctttccatattatttcgtttttaatttatttccaggagtctattttatgacctttaactgcaaagaaaaccaaatataaaaaacagggaatcaatacccaataaccgaaacgcagactatacatatctgccagatgaccatatatcagaggcagaatggcattgccacataatcccatgataagaagagaggaaccggttttggtgaatttccccagtccatgaatggaaagtggccagatacctgcgtagattaaagcatttgggaaacccaatgcattcagaaagaaaatggaggcattggcatgatgaccgaacagagttacttcaaaatctgcaaatacaactccgaatgaaaggagtaatccgatgatggtacaacctataagtgcatttttttgtgaaacatatttgggtattaacaggattcctaggaggtaaccaatcatagtacaggccaatgtatatgagggaaaagttttagcttcaagcaggtccatacccatcgaattggcataattgatgattgtatcaattgcgataacctgtgttcctacatgaagaaatatagccactgctcctaagataaggtaaggaaagtcgaaaatactttttctggtgtgatggtggctacctgtatcttccgtgctgttttcttcgtctgtattgatttcaggcagaatggagtaacggataccgataccggtaagcagtaaaataacgcctagaacagcataaggcacaatgacgcgttgtattaattcgtcaagcatagcgttctttgtgactatgtctaaagtccccgattctatagtggcaaaaagctccttgtcggtaacatttaatatcaatgcagcaaatatgagcggtgagacgatacctgcgaatttattgcatattcccataatactgattcgtctggcggcactatcaataggaccgataatagtgacataaggattagcggcagtttgcaatatggctaatccggtgccgatggaaaacagaccggccagaaatatctcgaactgacgggctaatgctgccggaacaaataagaaagctcctaaggcggtaagcataaaaccatacataatacctcgcttgaatcccactttcttgagaagtactcccgaggggatagccattacaaagtaggcgatgtaaaatgcaaaggcgacaaaataggattcgaaatgtgtcagttcacaggatatgcggaagtatggaatcagtatggcattgacccacgacacaaatccgaagataaagaacatccctgccagaattgcaattgatatgtagtatgtctttttgctgcttataaggttattgtttcccatgtgtttttattttttcagttcgaaatctttctgtaatttgatgtcccgtgacgatgcgcctattaatactgtaaacatacccggttcgtctttccagcgtttactttcggtatcgtagtattgtaaggcgcggcgtggtaacttgatagtgacttgtttggattcatccggttttaagccaaccttagtgaacccttttaactctttaaacgggcgttctacagaacatttgttttgatgcaaatataactgtgcaatttcctggccatatcgttttcccgtgttagtaatggtgaatgatacggcaaactctgtgtccgattctttccatacagatttcatctttatgtctgaataagtaaaagtggtataagataatccataaccgaattcaaattgggggactacacggtaagtatcgaagtagcggtagccgaccataagcccttccttgaaacggacggtgtcgtttatacccggatattctccaaatacgtgatcaggcatatcttccagacgcttacaccaggtagtagtcagttttcccgaaggattgacttctccaaacaatgtacgtgctagtgcatttcctccttccatccctagaaaactgccgtgcagtaatgccgtagcatcattataccattctcctatctcgacggggccaccggagattagtaccactacagtgttgggattaacctccaggataccttttaataatctgtcctgttggtagggaagctttaaattcggcttatcatacccttcacagtcagaaccatgttcgtgggaggttccacctatatagattaccaattctgcttgagcagctgtattgattgctttcttatataactcttcatcgaatttatcaaattcgttcgtgaaccaatgaccaaccttatacgcctttttactcaattgataaccgggggcatattcgatccgggcttttccatctaaaagattttgtagcccttccaaaggagtgacttcatatttggctttgagttttgtactgccacctcctgctgcaaatacttcggttgcatttgcgccaatcactgcgacattcttgtattgtgccgggtctagtggtagcatatctttggaattcttcaataataccaatgattcctccgctatttctctggcagccttagtatgggcaggtattgcaagtttggctgccatgcctgtggtgtcataaggagcttgtcctattaaatcaagtcgaatcatcaatttcagaatattacgtacttttttgttgacagcttcttccggaatctctccattacgtactttcttcaataaaggatcggctaaataatatttattgaaagcatatttcccattttctttgatgcttgttcccatttcgacatccataccacacagagctgttcgctctgtgttatggactgcattccagtctgatacgactaatccgtcaaatcctagttcatcacgaagtaaagtatcaagaagataaggactttccgtacaccacaaccctcgaaccttgttatatgccgccatggctgccatggctccacctcgttgtatggcagcttcaaaagccggaagataaatttcgtgtaaggtgcgttcgtctacttctacactcactttgtactggttgtatgcctggctattcagagcaaaatgcttcacacaagaggctactccctgtgactgtactccttgtatatatggaacagccagttcaccggagaagaaaggatcctcgctgaaatattcccaattacgtccattgagtaaggaacggtgaatgttgactcccggagccagacttacatgcttaccgcgtgctttacattcagctccaagaacttctccatatagctgtgccagatcacggttccaagtagatgctaaggcgcttaatgcaggtagatagctacatgcgtcgttatcccatcgggcggattcccacccattggctactccctcaaatcttactccgtgaggtccgtcggagtagtgcaggtcggggatgccaagcctcggaacaccggtacttgaaaacatcgtgttactgtgcaacattccaattttctcttccaaagtcatttgcgataataaactttctatctgtttatcagtacttgctactttattaccagtcaggcaggaggagaatataatcagaatcagccagctatatggagtcagtcttttcatactagaatacttgttgtctttgattattttgagttattttttcttgtttcaatttcactgtacacagcatccgggatcagatcaagccagtaaggatcctggacgagttccttgtacagttcaagtgccagagggtcactttgcagacggcggtcaccattctctgcattttcgtgattctcccatacgacgaccttgacacgtggctcttcatccttcagcttaaaccattctcttacccatctctggtggtcgcatgtactggagtatcctccttcactaatcatgataggcttgtctgccgatacctgcttgatgccttgcatcagcgtgagcggatatcttctatcttccggataagtagcactaagcgatggtggataacagcttactcccagccaatctacatacatatctcctggataatagtttttcattgcgtttgcttctgtacctggcatgcttacactgttgggtgaccatacgaagacattgtaggcagtgacacccaactgttctgcaatgttatacatacgtctccaagccttgacatagtttgtgggatctccgtaatacggagtccagcttccattcatttcgttggctggtctgaaccagataggtcccatgtcacgtactttttgggcagctacttcggcgaagtatgatttgtgaaaatcgtcgagttcgccatttgccatttgttgggtgggaatgacgggcagccatccgtaaaggaagaatcggtatttgccctgatagttttttccccagtatttctcacgtactgtttgcatttcgctgaaatttcgtcccggttccatattctgataccataagatcatagatagttgctttcccaccaatttttcaaataaggcaacggcacactggtcagtacttccttcgcggtcttccggatcgaatccgtataatggtgggaatgctccatgataacaccctttttcggggacgtacttcatgtcattatgaaattctcccattaccttgatttcgtcgatgagcatcatcgtactggtggaagctgaagatttgagagtcgctttcacatatctgcatgctacattactaatgtctgtttttccccaagcgtccgactttccgttgctgtcggaataggtaattggtgaggctgctttttcccattggcttttgtccttgctggttgatacttctatttgagcagggaatacaatttgtgatgtcggatcggaaatagcatgtactgatacttctgtgatattgcgtaatgatcccaaatcaattattacttctacagtttgtgcatcccaaccgactcctctgtttttagtcgagagggtaccggtctcctcatccgtcagtttggtgccggatgtccagggatcgagaggggctttatcagcataggcactgttggctacaacattcattttatagaatttgcctgccgccacattaataatgctttgttcatttggatctttgggcttatttggatcaaaagtaacttcccatgatctcgtttcttctgcattgcaagcgtatatgagtattgcaactgctattaaccataaattttttaatttcatatttagtggtatattataaggttgattactggttgtttgtattacatatcaatacagtcatattggtagcaggcgatgcctccattagagaatacgagataaacgtatagataataaccatttttggcaactttaaatacgacatctccggttccttcggtgttttgaccggaattctcgagacctccatatatcttgtccggacatactattatttggttgtcgaacgagccgctactaagatcatacatacggacagcatcagaaccagttacggcatagttgaaactatttacatgattgtaaatgatataaggtactttgttgaacacggcatagtctacggcattgataattgtgttacccggagcacccgtatttgccgcttttatgctattgtctgttcctttaaaccagtagaaatagcgtttggcagaagtatctgtgacatggctggccaagaaatagtcactttgagtatcagtgtcatcagcataaatcacatccgcccatttaatccagtttgaagtcagtagagaggaactcataatgacaaattccggactttgtgattgtaaagtaccatttatgacacgccaacgggcgaattgcactttactatccttttggaataccggagttgtgataagggcattggcatccaaatctccttggatagagatcttccaaccaaatcttatgttagtgccagttttatattcaatatatttctgtggtttctcattcactccattagctttccatacagtgaaagtacctcctgatggagtatagctgcagaataaaatattatttccccgatctgctgttgcatggaagtttgaattatcaccggcaaattggctgatatccatagaacctgctatttctccggtctggctatttaagtaaatggcacgatcattggcacgttcgttgatgacaacatatttgtcgactactgcaagtccggttactttacccggtagcagaataccgcttatttcagatagtcttttagaccataatagcttaccgcttccttggcgaatacctgcaacagttttttgcggaatatctttttttaccgtatatgttgctttatctataccattctgtgctgtgacaacaatggtctgttcttgttcatagtctagtgcttctgtttcggggttgggactgcatgttgctccatgtgagatatcaatgttagctatctgctcccctacattatctatggttactaatgaaattgttttttcgttttcattaatgactcccaatagccctatggcaggaatatcgaatttggtgatactacattcgttgctcttacggatttcacctattactttgaattcggtactagtcccggaggtctgatctttcactgtgatatagttgtcttgggtaagatccatataaagtaatggtggagttacactgacattattcgctaaactggcactcaatcttacccgttttagtgcagaggtcggcaatacattatccgacaatttgggataattgtatgggaaaacaaatgtgattgaatgattggtataatctatctcacctttgaaactattttcgctgctgtcatcgttcggaaacgatgcagtgatgctgttgataccttcgcgttgaatgtcagaacccaactcttcaggactgtgacaactagttactccccatagaagaactaatgcctggatgattgatataattttgtttttcattgttctaagagttttattgttatttccattcatcatattgctcaatcaatgagttattcttcaattcttcagacggtacaggaaggacatataatttctttataaacttgcggtcctgcccgtcgcaatcaacatattcgtatgtattggtagcgccaatgattttgaagccatgtgtgcgatagttgttgtattcaatatgggctaattcccaacgacgcatatcccagaataaatgaccttcataggctagttcaacctttctttcatttctgtaatctttgaaccaagcctcgcctgtagaggatttacccggtaaattcacttttactctggcgcgtacctcattcattgcactttgggcttccccgatcttattgagtcgataagctgcttctgctttgttcaataaaacttctgcatagcgaatttcaacccacggttgggcgcttttcccatttttgacgtctgttagcgtttcatctaacaatttccttaaaaaataaccggttgtggttttgccgtatgaagtaccctgttcccggtaaggcataaacacaccattctttccgtcaaggctgcaatccatctttttccctttccaggtacatcctctatagattacagttgcggcgaagcgaggttccagttggtcgtatggaggagtttcatcagtaatgccatgccagggtgtccagtctatcttttctccatttttgctttcataacattctaccatttcctgggtaggagttcctgttgaaccattgtcataaccatcacattgtggtacataataccggtcgaaaagatgattaggcccgttggcagcatcataatcaaactccagaatcgcttctttattattccctttccatgcatcttcatatttgtccgtcagaccatatagtttgagtgcaattacattattagcagcatcataggcatcctgccaacgtttggcatataacatagctcttgatttcagtgcataggctgctcctttggtgatacgccctttatttgccgcatcccattccttgggtaaattattggctgcaaaatcaagatcgtcagctatgaattgccaggtttcttcagcactgctgcgggctttattagttgataccggcagatcgtcatacaagatgacacctccatgtcttttggctaactggaaatatacaaatgcacggaaaaagcgtacttgagcttcccaaagcttatttctgtctgctgaaaattcggaatattttctttgtagagatagaaattggtttgtttctcggatctgtttgtatgctgttgaacgtagccagatactgtatagacagttatccggagagatagcatccggtgtaagtacataaagattaggatggccggctctgtgtcccagcgtatatgaaccatacttaaatgcgtcagtcagactttctgtaaaacttccgtagaattgggcctccccgaattgaccgtaatcatgcaggaggggatagaaactattcacatatttgtcaacctgggtttcatcttgccagatgatttcatcactaacggtagtcgtttgttttacttcatccagccagtcgttgcacgaacttaaagtcagcaacataaagaagagtgatatattaatacataactttttcatatagcgtatattttagaatgtgattttagctccaagtgtataagtcctttgttgcggataatatccattgtttacagctggagattccgggtcgatgttgtacttggacacagcgctgaaagtcagaaggttgtatccctcaacatagaggcgaagagcttccactcccaatggactcaaccattttttagggaaattgtatcctatttgcgctgtttttattctcaaatagtttccgttacgataccagaatgtggaggccagcccgttattcaaacttctcggattgatttccagacaagggaactctgcatttgtattttcgggtgtccaggagtttgccaccagatagactggtgcattgccattctgatagaatggacgcgtgaaggccgtagcgctttggattccggatgaaccggttgccgtatatactccggttaatgcaacatcgctgccaagcccccatgatgctaaaatatcaaaatcgaatcctttccagttaccaaataaattgaaagaacctgtgtgggtcggccttgaacttttacctacatacccctgatcttgattgacggttataataccgtctccatttctatccatatacttgatatatccgggataagccggtcggtcgggcatggtagcggagttggctatctcttcctcactctggaacaatccctgggcaatgaatcccattttcgaaccgatttgctttccggtcagtcgtctgtattccggtgtgttttcagagtcacctgcatatttgagccaccttccgtatgcgtatgaccagattaatttggctccatagctgaaacttccgattctgttctgatgtgtaaaggtgacatcaaaacccttataatctgctttattaacgttggcagttgaaaaataatagcctcccatggaaggagtgtgcgaaccggttacagaagataatttgtcatattcatatttataaaaagcatccagttccattcctaataatccattccataaagttacatctattccgatattatagttgaggcattgcgcccatgtcaaattgggatttcccaatacggacggatagatagcagtttgactggctccgcctattactacagaattgggggatgtgctcatcgtatttctccattggaaaggctggataccgctggttgcagtttttccaatacctgctcttaatttcagattgtctacccaagtagcatgaaaccatttttcattattgattctccaggcaagagagagaccgggcagggtgacccagcgtttgttcataccaccaaacagataactaccatcgtggcgtagtgaagcctccaaataatatttgtcagcgtaattgtagttcaaacgacctacaaaaccggctacacgtgtctggctgctgctacccgaaggtatagcaggttgctctttcccctctttggtgaatcctgtgatttggttcaactcatccaactgaatgaaatctaatccggttcccgttacaccgagattgttgctattacgttcccgtgtttcggccagtaataatactccgatcgagtgatctccaaatttgttatcatacgtgatactggtttgcgttgtgaactcttgggcgcgtgatgccgattcggataatataggtgtatctttcaaaacactgtagtccttatggtaggtgagtgtggtagtggctgcattaggtaaatccataatcatgacttcattcggcttggtcaactgtttagtcatcccatgaactaagtcgtacgctccctggaattttaaacttaatcctttaagccaaggtgtgtcgtatttcagactgaaattagactgcatatatgattggttggacctgttatatcctgaatcgtatatggatgcgataggagctaccggagaaccggaagtcggggttgaaacatcgtatattttcccattatattcataagtgtcctgtacgtatggcaaagcatagcatacctgttggggaatattcatccaatcatccggatcggcagaaaatttgggagcatcccgtttttctatacgccccgaaacacctaatgacagactaagtcctttagccaactgtgcatcgatattagaacgaagattcattcgacggtatttgaacttatctatatttcctttttcttccagataaccgatagatgtgaagaaacgaatcttttcacttcctcctgatgctgaaatattatgatgttggcgaacaccggttccatatactttatcgtaccaattggtatttccccatccgtcgacaccctcgcgcattttgcgcaccatgtcgacagtaaacacttccgtatcaccttgtagaagacgggctttattgtaccaataagcatatcccggtccgtcgagccattcttgttcttctgcattctggctgatacccacagtacctgtatagctaatggtgactttatctgtttgtccctttttggttgtgacaatgaatgctccatttgcgtccagaccataaacggctacggctgatgcatcctttaatacagacacagattctatttcattcggatcgagtccgttgaagtcacttgcgcttcttctgatgccgtcaataacatagataataccactttgcccgcgtatggataaggaggcattatccgcaccgggttgtccactggcttgtacggcggaaataccggcaacacgtgcaccgatgatattactgattcccatggttggggctttaaggatttctttatcggagacagtagatatggcggcggtcagactaccgcgcttttgagttccatagcctaccactacgatttcatccagcgaggaaacatcttctttaagagtgatattgatattcgtcttattacctactttgacttcctggctgaccattccgatataggagaataccaatacgtcattcttatgggcattaatgctatatttgccgtcaacatttgtaatggtaccgacattcgttgcacccttgacagctacagatacgccaggtaatggttcatcattaccatctttcacaaacccttttattacttcttgtgcaagacaatcgagagtgcacattaaaagagtaataaacaacgaggttactaaccttggattccatctgattttcttcattgcatgataagtttttaaatattagatcgtcgatttgaaattttaatttctaacaatagtctctttagaccggttaactagttaatgatacaaaagtattctgtttcaaagatatgtgcggtggcaaaaacgaaaaactatcttcaaaaaacgaagaataatgcatcgttaatcttcttttggcgtttttctttttaagaaccattcgaagaacttatatatagtttcgtttgattcgggagtaggatcatgtttgggcctgttcgtcattgccactcgatgatgataacccaaaagccggttgactgcaacagagtgatttaatggaatccatctgtctacattatcagaataacctcctgatacgagaaatgggcgaggagccaataaagaatggagttcatgtaaatcatgcccctctttacatagtctggcatagacacttgttgaagagttattgccgttgttgctccagatctttttccagggtgggggataataccccaagtaccaaggttcccaataattgatataattatctttggtttcatcaaagacgatacccggatcactccaggcggtgcaggcaaacttttcatataaacaagaagcaaacatagcccatttagcaccgtaagagtgtcccatgataccaattcgggtagagtcgacactttcgactctggctaatacttcccatgcattggctgccgcataagcaagtactgaaagaggttgcatagtggagttgttaatagtcgggtaatagagagagtaagtcttatctttggtggtctgtctagttcctaatgagagagtaacgaatcctcttttggttaattggtaggcgaaatctctattagcttttcctccccatccgatagctgtttccggttcgtagaatactgtgataacggcaggatgtttccctttcttatttggttccagtaaatagccgtaagtctgttccagaggagtccaataaaaacgcactaaatgttgtttgaaatcttcgcgttctgtggtttttataatctccagtttttgattggtgatgatagccggccaatgaccgatcaggttcaaccatttgtcttttatttcttttcttcgttttagccaatcgtctgcgtttttgactgtatctccattgtaaaataaaagaggattgcggtaagttccaaatttctcctgatacagtggtggtggggtaaagtaggcggatagcttctcccagtttctttttgtctggttaatctctaatcttttgcaccccattattgaggtgacccccaaataaataataataggatagataatcgttcttgtttttcctcttatggtatgtctttgcatagtattaatatctaaaatgtatttcgaaaggtatgaaaacaaaggtaggtcattctcatgaatgatcttaatgtcaaaacgaaaaacagtcttcagaaagcgtttattttatctttgtctagtctttttctgccggtattcaataggtgaacatcctttgaattttttgaaaatccgggcaatgttattatagtctgtaaagcctacttccattgctaaatcggccaatggacggtcggttgtgagcagtagatctgcaagatgattacaccggcaattcagaatatattggtatatagaggtattcagtgcgtttttgaatttcacttcgaagtttctgcgggatagcggaatgtttgcaagcagagactctatggtcaaatcggaactgtaatgagactctatatacttcactacttccagaatataagggtctttgatattgtgtttctccgtagattgccgtaattcgatgcggataggattgataacaatattgaaagtaccttcgtgttccttttttatttgttgatgaataagtctgccgatagaatatccgcctctttctacttcgagctctatggatgaaatgggagggtcggaaatattacacatcagttcgtcattgtccacgcctaataaagcaatttcttccggaataggaatattcgtcattttgcaagtttcagaaatgaatagggcgtgcgcatcatcacagcaaaatagggcgactggcttggggagttgctgcaaccattggctgacttccattcttatctcgtcttcctgcttatccgattcgaaactgaaaaattcgcctccgatgcgttttacttcctgccgatacccttcgcaacgttcgtcagaccaaaccacccctttaacgccgaaataagcaaaattgcgaaacattctcttggcaaaaaactgggctgccattcttcccgttcctttatagtcgcctgtcagattagagtaagtgacgctccggtgatggtagttttgtagtactaccggaatattcagctccttctgcaaatcgatcgtatcattattccactgaccgataatggcgtcggctttccattctttcgcccatcttaaaatgccttgttcaccatgcattgcgctataataagaaggtagtcggtaaaagagccaggggccgttttctttggagtattggacaagtccccgtagcagtttcctgtcaaattcgcttgaatagtctatcaatagaagaatcttaatcatagttctatgtttttctttagtataatgtagggatgcacaaatatagaagaattcctttgttttcctataataaaaacttaattttgtagcaagaaaaacttgtatgacacccgggtctcgtgctgtacgacacccgggtgttgttgtgttcgacacccgggtctcagtatgcatgacacccgggtgtcgtacaaattatgataactaacttaaaaagaaaggagcgtaagattatgtctatcccttatgtagtgagaaagaaagcggatttatcatccggagaacggaaagagttatggtatggtgtacctagtaaaatgcagcgaagaggaggagtgaaaaataaagaacttgcagtacggatggcaaagacaacaggctttcatcgtgggcagatagaaggaatcctgtcggagttggttgaaagtattcaagacctgctttcctccggtcattcggtgaccattgagggattgggaacctttcaaacggcactgaccagtcagggatgtgtgctgcccgaacaggtaacgccggggaaagttgctatttcacgcgtatattttgtggcaaactcaaaattcagcagggaactgaagaagacaaagtgtacccgcataccttttaaatattatatgcccgaaagtatgctaacgaaaaatatgaagaaagcagaccgggaactggaacaaacagaatacgacatagaagagccggaaatcgacgaatagttgaataaaaaacaatattgtcttgttaattgaacagaattagattatatttgttcagtggttagaacaatatcttgaaatatgattagaagagaaatactaaaagaagttctattagataatagaaatgaggtggtcaaacatcaagttatacctcgtagctttcagtttgaagagtttggaaattatgtatttgtaggtatccggcgagcaggaaaatcatttttactttatcaacggatacaggaacttttgcataatgggcatacttggaatgaaatgctatatgtgaactttgaagatgaacgtttgattggaatgacggcggcagatttaaatctcatactggaagtacatgccgagatgtcaacagacaggccgatgcttttcttggatgaaattcagaatattgatggttgggacaagtttgttcggcgattggctgataataaatatagggcttatgtgacaggaagcaatgctaaaatgcttagtcaggatgtagctaccactttggggggacgatacattacagtacatgtatacccttatgattttaaagagtttctttatgctaatggggttgaagttacagagaattctttgtttgcaacagagagccgggcagaaataaagcgtatattcaatgattattttcgttccggtggttttccggaaggggcatcgcttgccgcaaaacgggattatctgacaagtgtttaccaaaagatatatttaggagatattgctgcaagacattccatcgaaaatacttttgctttacgcatccttttccgcaaattggccgaaagtataaagcaaccggtttcgtttactcgtataactaatattgttgcttcaaccggagtgaaaatatcgaagaatactgtcattaactacatggaatatgccaaagatgcttgcttgctgattcctatacaaaatattgcggataaattggtggagcgtgaaactaatccgaaatattattttgcggataatggcattctcaatttgcttcttttggatgctgatacctcgttgcttgagaatttggttgctgtgacactattgcggcgttatgggacggacgatgctgtattcttttataatagaaatgtagaggttgatttttatttgcctgatacaggagtggctatacaggtctgttataccatgaatctctctgatgagactttccaacgggaagttcaggcattagtaaaattgaataaggtatttgaatgtcggcagttattgataataacgtatgacgatgaagaacggattgagttggaaaaatgtgcgattgaggtaataccggtttggaagtggttgttgggtaaataagataaattaataccctccctgtcttatttatgagataaatccctatctttgtggcactttttacgaaaaaagcaaattcaaattaatagatatagaaaagaaaatggcacaagaagacgtttttaagaagcttgtatcgcattgcaaagagtatggtttcgtattcccttcgagcgatatctacgacggactaggcgctgtgtatgactacggtcagatgggcgttgaattgaaaaataacatcaagaaatactggtgggacagcatggtgctgttgcacgagaacattgtcggtatcgactctgccatctttatgcatcctactatctggaaggcttccggacacgtagacgcattcaatgaccctttgattgacaataaagactctaagaaacgttatcgtgctgacgtgttgatcgaagatcagctggctaagtatgacgataaaatcaataaagaagtagcgaaagctgccaagagattcggcgaatcttttgatgaggctcaattccgttctaccaacggacgtgtattggagcatcaggcaaaacgcgacgcacttcacactcgctttgctaaagctctgaacgacggtaatctggaagaattgcgtcagatcattattgatgaagaaatcgtatgcccgatctccggtacaaagaactggacagaagttcgtcagttcaatctgatgttctctactgaaatgggttctacttccgaaggagcaatgaagatttatcttcgtccggaaactgcacaaggtatttttgtaaactacctcaatgtacagaagacgggtcgtatgaaagttcctttcggtatcgcacagattggtaaggctttccgtaacgagatcgttgcccgtcagttcatcttccgtatgcgtgagttcgaacagatggaaatgcagttctttgtaaaaccgggaactgaacttgactggttcaagaaatggaaagaaatccgtctgaaatggcataaagctcttggattcggcgatgcaagctatcgttatcacgatcacgataaactggctcactacgcaaatgccgctactgatatcgaattcctgatgccgttcggattcaaagaagtggaaggtattcactctcgtactaacttcgacttgtctcaacatgagaagttctccggcaagagcatcaaatacttcgatccggaactgaacgagtcttatactccgtacgtaatcgaaacttctatcggtgttgaccgtatgttccttagcatcatgagcgcatcttattgcgaagagcaattggaaaatggtgaaagccgtgtggttctgaaattacctgctgctttggctccggtgaaactggcggttatgccgttggtaaagaaagacggtctgcctgaaaaagcccgcgaggttattgacagcctgaagttccacttccattgccaatatgacgaaaaggatagtatcggtaagcgttatcgccgtcaggatgctattggtactccgtactgtgtaacagtcgatcatcagacattagaagataactgcgtgacattgcgtaatcgcgataccatgcaacaagagcgtgtagctatctctgaactgaataatatcatcgcagacagagtaagcatcacttctctattgaaaactttacaataaaactttgacgaatgagtaaaaagatctatttattctccttagtattgctggctcttgcattcactgcttgcagtgaaacggaagagacgggcaaatatgataactggcaggcacgtaatgaagcttttatagattcaatagccaatgctcatgcaaataccgctacacgtggtcagttggattctattcatatgattgcatatcctggagttcctatctattttaaaaagaaaactcctgtgggagatggggtgattcaaaatattatcccgcgggcaacagatgaggttactgtatattataaaggttcttatatcatttggggtaatactggtggttatgttgataaacaagataactttataggggaagcgtttgatggctcttttactgaagcgaatcctagcattgatttttcaagaactgcgaacttaacaattaatgggcttgtgactggtttgtcagaggtattgcaacgaagaaaaattggtgaacgtttggaagtgtatgttccatggaaatatggttatggtagtagtgattatactccaaaaggttcttcgattactattttaggttattcaactttagtatttgatattcaaatgttaaagtgcgaaaaataatcacttattatcatttggaatttattaaaataaagttcccttattctaatcctatttcatctatggcaaaggatagaataagggagcttattattaatatagcattggtttagatatgatttttattctatgaattatttctaaaactgaagtatttcatatattgtatttctaccaggagtaataccatggaaattcttatctgcaggtaagtcatatcctataggattgttccatttatcccatacaatagcttgatttgcattcttttcattttcatcatcaatccataatcctcattgtcatgatgtcgtttgactactccttatgttttgttccttcttgcttatattacagaagattacatttttgattttttatactactctccctaatctgcaaatgtgttggaatcgtcacctgcttgatagtcttatctccttttatctgatcgataagtagttggcaggcagtttctcccattttataggtctgatgtgatactgctgataatttcggttccacataattagcatgctgctcgtctgtatacccgatgattgccacatcatccggtatgcggaggccatggtttttgataacttccattgctgcgaaagccaatgtgtcattcatggcaagaatagcgtccggaggctgtggaagtgatagtaaagtttctgtggcaatcttgccttcctcataatcaatcttccggcaaacaactagctcctttttgataagaatacgattctcacgtaaggcttccagataaccatgttttcttctctttacaatatccagatgattagctcctccgataaaagctacccgctcgcttccattatccaggagatgttgtgtagccatctgtgcggattgtgccccgtctgctatcaccgatgaaaattggtcggtcaggcaaacacggtcgaacaggataagtggcatattaatgtctttcaaggtggagatgtgggagaaatcggttgtttcttgagacagacaggcgatgataccttccacacgcatattgaccagattctcaatatttcttttttcgtgctcgtaagactcatgcgaggtcgtgataatcacgaaatacccgttggcaatagccatattctctattccattcagaattgatgcaaagaaatgagtgacaatatccgggactaccactccaatgatacgtggcgcatttttccgcaggctcatggcaaaaggattggggcggtagttcatctctttagccagtgcctttgctttggcgcaaagttcacggctgatttccggactatcttttagtgccctggatacagtaggaatcgacacccccaatgcttgggcgagatctttgagtgaagtatgtttccggttttccatttgaaagtctgcaacttagattctttttacaaagaaagcacattctcggaaaattaaaagcatctgaagcaatattttttacgtaaaccgttacgttggtttttcgaccgctctctgctgcactgaaactattactgacctatttttgtcgcatacaaaatgatttaaaaccttgagttcaagttataaatgcaacttttaaagaaaaggattaatagctgcataagtaatatttttttcagagagaaaagagagacaattccctctgttctctgctgaatggataaatgttactatctttgtttttattgtccgtccaaagaaataaaagttgtagatgagtaaacatataaccgaaaagcaaaggtatgcaatttctaagatgttgcaagttccgatgagtaaaaaagatatagctgaagctattggagttgataggagtaatatttatagagaaataaaacgcaattgcgatagtcgtagtggaaaatacaaccctgatcttgcccaaagaaaggcagataaacgtaaggttgaaaagaagcgaaaggaggtatttacacaagctatgaagaagcgtgtaaaaaagcttctacgaaaggacttgagcccagagcagatagtgggcagaagccaagtagaaaatatagctatggtatctcacgaaactatatattgttggatatggcaagataaacgacaaggtggggatcttcataaatctcttagaaggcaaggacgcaaatattcaaagcgtggttctaaaaacgcaggtagaggatttattccgaatagagtggagattgatcagcgaccttcaattgtagagcaaaaagaaagatttggtgatttagagatagatacaattattggaaagaatcacaaaggtgctattctaaccattaatgatagagcaacaagcagagtatggatacgtaagctatcagggaaagaagccatccctgtagcaaagattacagtatgggcattacgaaaagtaaaaaacttaatacacacaataacggctgataatggaaaagaatttgcaaaacacgaggatatagcacaaaaattagatattaatttctatttttgtaagccataccactcttgggagcgtggtgccaatgaaaatactaacggtcttatcaggcagtatatcccaaagggtacggactttagtgaagtaaccaacaagcgtattaaatggattgaaaacaatctaaataatagacctcgtaaaagacttggatacctcacaccaaacgaaaaatttaaacaaattattaatatgaattccgttgcatttggaacttgaattcagcaacctaaaagtatgcaataccatgaaatcggaaagacagggatgaaagtatcatctcttagttttggagcttcttctttaggaggagttttccatgatttgaaagaaaaagaaggcattcaggctgtgtttaccgctgttgaggcaggaatgaactttatcgatgtgtctccttattacggacattataaagcggaaactgttttaggaaaggcacttaaagatcttcctcgcgaccgttattacctttctaccaaagtgggacgttatggaaaagatggagtaaatctgtgggattactctgcaaagcgtgctaccgaaagtgtgtatgagagtatggaacgtctgaatatagattttatcgatctgataaatgtacacgatgtggagtttgccgatttgaatcaggtggttaatgaaactctgccggctttggttgagttgcgtgaaaaaggagtggtaggacacgttggaattaccgacttgcaactcgagaacctgaaatgggtaattgaccattcaccaagcggtacgattgaatctgtgcttagcttctgccattattgcctgtgtgatgataaattagcagacttcctggactacttcgaatccaaagaaatcggcgtgattaatgcttctcccctttcaatgggactgttgagtgaacgtggtgttcctgcctggcatccggctcccaaacctttggtagaggcttgccgtaaagcaatggaacattgcaaagctaagaattatccggttgagaagctggctatgcagttctccgtcagcaatccccgtatagcaacgactttgtttagtacgactaatccggagaatgtgaaaaagaacatcgctttcatcaaagaacctattgactgggaactcgttcgggaagtgcaggagattatcggagagcagaaacgtgtaagttgggcaaactcataaaacagcgtcattcgtatggactatacaattattgatgcgcacgcccatctgtggttacgacaggatactgttgtggacggattgcctatccggactttggaaaatggccgttcggaatttatgggagaaatccggcaaatggttccgccctttatgatagacggagtgaatagcgcggaagtttttctttcgaatatggactatgcgcaagtggctgcggctgtcattacccaagagtttattgacggtattcagaatgattatttgtcggaagtcgtttcccattatcccaaccgtttctttgtttgcggaatgtgtgagtttcgcaaacctggatttttggagcaggcgaaagagcttataaccaaaggttttaaggctataaaaatccctgcccagcgcttgttgttaaaagagggacgggtaatgctgaataatgaggaaatgatgcagatgtttcattctatggaagaacggaatgtcatgctctccatcgacttggctgacggagcaacacaggttcccgaaatggaagagattattcaggaatgtccccgcctaaaaatagctgtcggacacttcggaatggtgacacgtccggactggaaagaacaaatccgcctggcacgtcatcccaatgtgatgattgaatccggcggaatcacctggcttttcaatgatgaattttatcctttcaaaggagcagtgaaagccattcgggaagcggcggatttagttggcatggagaaactgatgtggggatcggactatccgcgcaccattacagcaatcacctacaagatgtcatacgattttgtggtgaagtcttccgagttgacggaagaggacaaaagactctttttgggagaaaatgcccggaacttctatggattcacggatctccccgtacttccttacatcaagaacatgtccgaatgatagagaaaacatccttatcgtaaaactagatttataccatgaaaaagaatacatatacaatacctttagcgttagttttctgccttttctttctgtgggcgataagcagcaatctgcttcccacaatgatccggcaattgatgaagacatgtgaactgaatacctttgaagcctcctttaccgagactgcctactggttggcttattttattttccccatccccatagcgatgtttatgaaacgttacagctataaggcgggaattattttcggactggtattagcagcaatcggaggcctgcttttctttcctgccgccattttaaaagaatattgggcttacctctgtatcttctttattatcgctacgggaatgtgctttctggagacagctgccaatccgtatgtgacggttttaggagcccccgaaacagctccccgccgattgaacctagcgcagtctttcaatggactcggagcttttatcgctgccatgtttttgagtaagctcatccttagcggagctcattacacgcgagagacccttcctatagattatccgggaggctggcaggcctatatccaattggaaacggatgccatgaaacttccttatctgatattggctatattgttgattgccatagctgtcgtcttcgtcttttcaaaattgccgaagattggggacgaaggagaaacggcttcttctgataaaacgacttctttgggtaaaacgaaagagggcagccagaaagaaaaactgatagacttcggtgtattgaagcattcacacttgcggtggggagtgattgcgcaattcttctataacggcggacagacggcgataaacagtctgttcctggtttactgttgcacttatgccggattgccggaagatacagcgactaccttcttcggattgtatatgctcgcatttcttttggggcgttggatcggtaccggattgatggtgaaattccgtccacaggatatgctactggtttacgccttgatgaatattcttttgtgcggggtagtgatgatatggggaggtatgatcgggctatacgcaatgttggctatctctttctttatgtctataatgtaccccacgcagttctcattggcgctaaaaggactggggagtcagacaaagagcggttcggcatttctggtaatggctattgtcggcaatgcctgcctgccacagttgacggcttatttcatgcacgccaatgagcatatctattatatggcctattgtgtaccgatgatttgttttgtcttctgtgcatattacggctggaaaggttataaagtaatcgattaataaatctatttatcaaacatatccaatgaaagcagttcaaattgtcaatccctccgaaatgaaggtggttgaactggaaaaaccgaccgttggtgccggtgaagtattagtaagaatcaagtatgttggtttctgtggctctgatctgaatacctttttggggcgtaatccaatggtgaagttaccggtaatcccgggacatgaggtaggagcggtgattgaggagattggtccggatgttccggccggcttcgaaaaagggatgaacgtgacattgaatccatacaccaattgtggtaaatgtgcttcttgtcgtaatggtcgtgtcaatgcttgtgagcataatgaaacgttaggagtgcaacgcaatggagtgatgtgcgaatatgccgtattaccttggacgaagattattccggctggtaatatctctcctcgcgattgtgcgttgattgagccgatgagtgtcggattccatgcggtatctcgtgcgcaggtgatcgataatgaatatgtgatggttattggctgcggtatgattggtatcggtgccattgtacgtgctgctttgagaggggcaacggtcattgctgtcgatctggatgacgagaaactggaactggcgaaaagggtaggtgcttcttatgtgattaactccaagacagaaaatgtacacgaacggatgcaacaggtaacggagggcttcggtgccgatgtggtgattgaagctgtcggcagtccggtcacttatgtgatggcggtggatgaagtcggttttacaggacgggtcgtttgcattggctatgccaaaagcgaagtagctttccaaacgaaatatttcgttcagaaagaactggatatccgtggttccagaaatgcgttaccagccgatttccgtgcggttattaattatatgaaagaaggcaactgtccggtggaagaactgatttcgaagattgccaaaccggaaggagctttggaagctatgcaggaatggacggctaatccgggaaaagtgttccgtatactggttgagttctgataagttcttgtaataagaatagttgttgatgcctgttgtttcgggtatgtaataagtgagaggaggctgaatacagtctcctctctttgggagatagggtgatgtaacatgagtaaatatagatgtaacattcttcattcgatatgtagcatcacaaagaaatcatgtagcatactttgggcaatatatctgtttgcattttctatttttgtgatgtggaagatgacaagaaacattttaaataattagctttcaaataatagataatgtagccagttaataaaaaaacgatgattatgctgaaaacaaaaatcaacactattctactgtgtactctttttacattgttctttccgctatcagccggagcacaataccgtaatcctattctttatgctgacgtgcccgatatgtcggtgtgccgcgcaggcgattacttttacatggtttccactactatgcacctgatgccgggagcgcctatcatgcgttcgccggacatgaaacattgggaaactatcagctacgtatttcctcgcattgacgatggtccccgttatgatctgctcgaaggcactgcttacgggcaaggacaatgggcatcatctatccgctatcatgacggtaaattctatgtatggtttacagccaatggcgcgcccggacgtgggtttgtttatactgcgacagatccggccggtccctggaaacttctttcgcgtcccccgcattttcatgacggttcgcttctgtttgatgatgacgggcgggtgtatctctttcacagtacgggacagcttacggagttgaaacccgatttgaccgatgtacttcccggtggcatcaatcagcaaatatttgaacgggatgctgacgaacaaggtctgttggaaggtagttccgtcatcaagcataatgggaaatattatttgctgatgatttctatggattggagtattcccggccgtctgcgtcgtgaagtatgctatcgtgccgataagattaccggaccttacgaaaaacgtgtcattcttgaaacggagttcgacgggcatggcggtgttggtcagggatgcatcgtagacgggaaaaacggtgaatggtacgggctgatttttcaggatcgtggtggcgtagggcgtgtgccgtgtctcatgccttgtacatggacggaagatggttggcctatgctaggggacaaggatgggcacattccgaatgataccactttatcgtatatgtcaatggatggtatctgcggttcggatgatttttccgcttccgggctttccctctattggcagtggaatcataaccccgtcgatcaggcatggagccttaccgatcgtcccggatttctgcgtttgaaaacctcccgtgtggtagataacctgtttgttgctcccaatacgttgactcaacgtatggtaggaccgaaatgcatgggcactgtcagtctctctctgggggggatgaaagatggtgaccgtgcaggattatcggcttttaatggtgacagcggtgtgcttacgattgaaaagaacggaaataaactgtctcttgtgatgagtgaacagaaaagcgtgtttgagaaaacaaagcgtgccattagccgtgtggatatgaccgaacaagcccgtatacctcttgacaaagagcttgtctacttgcgtgtggaaggtgactttaccaatggacgggatgaggctcgtttttcttatagtcttgatgggaaaacatggatacctgtcggtctgcctgtcaagatgaaatttgactacacccgtatgttcatgggcagtaagtttgccatatttaactatgctacacgttctgtaggcggttatgtagatgtggactcttttgattattcgttctgtgatgcgtcaatgtaacacacaaatatgtatttgtaatcaatgaaacattgttttattggaaaataggctatttttgtttccaaattaatcataactaataagtataatattatgaaaagaggttggataccgattatgggtgtttgtttggtgttatcgttttcggcatgtaagcaattgctgccttaccaggacacttctttaacggcggaacaacgggcggaggatttgttgccccggttgactttggaagaaaaagtatcattaatgcaaaatgcatcacctgctatccctcgactgggaattaaagaatatgagtggtggaatgaagcgttgcacggtgtgggacgtgccggattggctactgtttttcctcagtctatcggtatgggagcttcttttaatgattcattattatatgaagtgttcaatgccacttccgatgaggctcgcgtaaaatcgcgtattttcggtgaaagcggcgtgctgaaacgctatcagggattaacattctggacaccaaatgtcaatatattccgtgaccctcgttggggacgcggtcaggaaacatacggtgaagacccatatctgacaggacaaatgggaatggctgtggtccgtggcttgcaaggaccggaagatgccaggtatgataagctgcacgcatgtgccaagcactttgccgttcattcaggaccggagtggaaccggcatagttttgatgcggagaatatagatccccgggatttatgggaaacctatctgcctgcttttaaagatttggtacagaaagcgcatgtaaaagaagtgatgtgcgcctacaatcgttttgagggagagccttgttgtggcagcaatcgcctgttgatgcaaatattgcgggatgaatggggatacaaaggcattgtagtctctgactgtggagcgatttccgatttccatagaccgggaacgcatgagactcacccggataaggaacacgcctcggcagctgctgtgcggacaggcacagaccttgaatgtggaagtgaatatgcttcactggcggatgctgtaaaagccggtttgattgacgaaaaagaaatagatatttcattgaaacgtttgttgacagcacgttttgaactgggagaaatggacgaacaaccggcttggtcggaaattccggcctctgtgctgaatagtaaggaacatcaggcattggctttgcgtatggctcgtgaatcattggtgctcttgcagaataaaaacaacattctgcctctgaatacccatttgaaagtagccgttatgggacctaatgccaatgactccgtgatgcagtggggaaattataacggtatttcggcacatacggttaccttattggaagctgtccgtgccaaactaccggaagggcaaatcatatacgaaccgggttgtgaccgtgtggacggaaagacacttcaaagcctgtttgatgaatgtagcataaacggtaaacccggtttcttggcagaatactggaataatcgtgatcgtgaaggggaagtcgttgctaccgatcagatttccactccgttccattttgcgacaacaggggctactacatttgcgcccggtgtggaaattactaatttctcggcccgttatgaatcagtctttcgtccttcgcagtcgggtgatgttgttttccgttttcaattggacggtgaagtgactcttattataaatggtgagcaagtggctcagaaaatatatgttaagaatccgacgaacctctatacgttacaggcgaaagctggaaaagagtatcatatcgagattctattcaaacaacggaatgaaagggctacacttgattttgatttgggcaaagaggtcgggatcgacttgaacctcgcagtgaagagagtaatggatgctgatgtgattctttttgctggtggaatttctccaagtctggaaggtgaagaaatgccggtagaagttcccggatttaagggtggtgaccgtacggatattgaacttccggacgttcaacgtgatttgttgaaagctttgaagaaggctggtaaaaaggttgtctttatcaattattccggttcagctatcggactagtgcccgaaacgactacttgtgaagcgattctgcaggcatggtatccgggacaggcgggtggtacagctatcgttgatgctctttggggagagtataatcctggtggacgcctgccggtcactttctataaggatgtgaatcaattgccggactttgaagactattccatgaaggggcgtacctatcgatatatgcaacagcaaccacttttcccattcggtcatgggctgagttatactacgtttacttatggagaagctaaattgagcaagaatacaatcgccaaaggtgaaaatgtagtattgactattccggtaagcaatgtcgggcaacgtgatggagaagaggtggttcaggtttatttgagacgtccgggtgataaggaaggcccccgttataccttgcgtgctttcaaacgcgttcatattccggcagggaaaactgaatcagtagctattcctcttactggtgtgaactttgaatggtttgatgtagagtcgaatacgatgcgtccgttggaaggtacttatgaattactgtatggaggaacttctgatagaaataagttgaaaacgattgtaatgaacgtacagtaataccgctttggaattttgtttatttttacagatagacaatccggatttatttattgaatgaataaagaaagaacgaccttgttcctttaaaaggaacgggtcgtttcttttaaaccaacgggggctttcctttaaaggaaaatgaatatttgctaattcttgatattcagcattttatatgatggaagataaaagtgctgaaataataggtaatgtagttaattatcttaccatttttctgttttgaggctttttgttacatcagaaaagaatcatgttacatgtctgtgataaatgtaacctgtatatagatgcctgtatcatgattgtacatatatgataaaaccgaatcgatacatttgcaaacactactatggaacagaaaattatagaaaataaaaagtgataatatgagaacattaaaattgattttgtcgggctggcaatccgtggggcttgtcgtatttattatgttgttttttaatatggaggtgagtggtaagggtaaaataacgaaaaatgctcctgtctttacgcaatttatttatcagggggaggatgctatttatcaaaacaatcctttaaagccgggtgagttctataatcctattttgcagggttgctatcccgatccgagtataacgcggaaagggaatgattattatttagtgtgctcatcttttgctatgtttcccggggtgcctattttccattctaatgatctggtaaactggaaacaaatcggtcatgtgctggacagaacgtcacaattaaaggttgaagattgtggtattagtgctggtgtatatgctcctgctataagatataatcccaataatgatacgttttatatgataaccactcaattttccggtggctttggaaatatggtggtaaagacaaagaatccggagaatggctggagtgatccgatcaaacttcaatttgaaggcattgatccttctcttttctttgatgataatggcaaggcatacgtggtacataatgatgctcctgcaaaagcaaacgagcgttactcgggacaccgtgtcataaaaatatgggattatgatgtggagaatgataaagtggttccgggaacggaccggatcatagtaaacggtggcgtcaatatagaagaaaaaccgatatggattgaggctcctcatatctataagaaagatggacgttattacttaatgtgtgcggaaggaggaaccggaggctggcatagcgaagtcatttttgtaagtgatcatccgaaaggaccttatcttccggcaaataataatcctattttgactcaacgttattttcctgcaaaccgggcgaataaagtagactgggctggtcatgcagacttagtggagggacccgacggaaaatattatggtgtatttttgggaatacgccctaatgagaagaacagagtaaataccggacgcgaaacctttattcttccggtggactggagcggaacatttcctgttttcgaaaatgggcttatccctatgaaacctacattgaagatgccttcgggagtagagaaccaaacagggaaaaacggttatttgcctagtggcaactttgtctttaaggatgatttctccgataagacattagaccttagatggatcggtcttagaggacctcgtgaagatttcgttgatatgaccgataaagggttgcggatcatcccttttacctcaaatatcaatgaagtgaaacctacttctaccttgttctaccgtcagcagcataatcaatttacagcggcagcgaccatggagtacaaaccgaaaaatgagaaagattttgctggtataacatgttatcagaatgaaagatatcactatgtcttcggtattactaaaaagggaaaagactattacctgatgctgcaaagaaccgaaaaaggacaagcgagtgtcctgggtgaggtgaagatagaaacagagaaacctgtgacactgcaagtagcagccaatggagatgattatcgttttaattattcgattgatggcaaaagttttacaaatttaggaggaaccgtttccggtgatattctttctactaatgaggctggtggctttacaggagcaatgattggactgtatgcaacatctgttggtaattaattagaaaccttatcattccataattatgaaaatacatcatctattttggggtatatgtttatgcttcagcacaaatattttattcgcacagaactatcagaaaacatcgtccggcatcaaaaccactgtaaatgcagtggatatagaagtacaattctttgcgcctgctgtggcgagagtaataaaatcgccggaaggggttgcctatgaaaaacagagtctttctgtaattgccaaacccgaaaaggtaagtttcaaggctgatatacaagataataagattgtattgaacaccagcgaactaagtgtcagtgtggacaccgggacgggaattgtttcttatttctcaaaggatggcaaatccttattggcagagaaatccggtatgcagtttatcgatttcgatgatgccgggacaaaaacttaccaggtttatcaaccttttatattagatagggaggaagccatttatggtttgggacaattgcaaaatggaaagatgattcagcggaacatgactaaaaatctgatacagggaaatgtggaagatgtgtcacctttcttccagtctactaaaggatatggtgtgttttgggataactattcgccgactctttttacggacaacgaagttgaaacatctttccgttctgaagtaggtgactgtgttgactattatttcatgtatgggaagaatgccgatggtgtaatagcacaggtacgcagcttgaccggacaagcaccgatgtttcctttatggacttatggttactggcaaagtaaagaaagatataagagccagaaggaagtggtagacgttgttcgtaaatatcgtgaattgggtattcccttggatggcattattcaggattggcaatattgggggcataactatttgtggaatgcgatggattttcagaatccgactttcaataatcctcaaaagatgattgaggatgtccatgcaatgaacgcacacatggctatatctatctggtcgtcattcggaccgatgaccaagccttatagagaattggataaaaaagggatgttgtttaacttcactacctggccgcaatcgggattggagtcatggtcccccaacatggaatatccttccggtgtaagagtgtatgatgcttacaatcccgaagcgcgtgatatttattggaaatatctgaatgatggaattttcaagttgggaatggatgcctggtggatggactctaccgaacccgaccatttggactggaagccggaggatatggataccaaaacctatctgggctcgttccgtaaggtgcgcaatgcttatccgttgatgactgtcggaggggtttacgaccatcagcgtgcagtgacttcggacaaacgcgtgtttattttaacccgttccggattcttggggcagcaacgttatggtgtaaatgtatggagtggtgatgtcgcttccacatgggagagttttagaaatcagattcctgccggattaaacttttctttgtgtggtatacctcactggaatagtgatattggtggcttttttgcaggacattataataaaagctggaatgatgatagtgcttcaaaaaatccattgtatcaggaactttatgtgcgttggttgcagtttggaacgttcaatccgatgatgcgttctcacgggacggatgtttatagggaaatctataagttcggaaagaagggcgagcctgtatatgatgctatcgagaagatgataggtttgcgttactctctgttgccttatatttattctacttcttgggaggtgagcaatcgccaatcgagttttatgcgcgctttgatgatggattttgtagacgacagaaaggtgtgggatatcaatgacgaatatatgtttggaaaatcgctccttgtggctccgattgctcatgcacaatatacgccggaagctgtggtaaaagtctccgaagaagagggatggaacagagatggagcgaaaaaaacaaaaactgatgttgctgtggatttcatggaaacgaaatctactaacatatacttaccggcaggaacgctatggtatgacttttggacgaacgagaaacacgaaggcggaaaggaaattaccaaagagactacactggatgttattccattgtatgtaaaagcgggtagtattattcctgtcggtccacaagttcagtatgccactgaaaaaccgtgggatcatcttgaattgaaggtgtatgcgggtgcgaatggaaacttcattttatatgaagatgaatttgataattacaattacgaaaaaggagcttatacggaaattccaatctcttggaataatgcatctcgtaaattgacgataggggcaagaaaaggtgcgtatgagggaatgttgaagaaccgtaagtttactgtaactcttcaggacgggactcaaaaaaacgtcgattataatgggaaagcgatttctgtaaggttttgattgtaatagaatgtgtgattatgtcagtagaaaagaatctgaaaagtaggaatatgatgaagttttttatagtaatggctatgctattggggagtagcgttacaagtgcagaaaataaacagataacaagtcctgatggaaagctggtagtgacagtctcagatatggatggaagaccttcttattctgttagttatgacaatgttctctttttgaagccatctccattggggatgattgcaaatataggagatttttcatcggggatgtcgctggaaaagaatgtttcaaccaataaaatagatgaaacatacgagttggcttctattaaaaagagcaaggttcgttatgtggccaatgaagctgtattttcgtttacacaacaagggaaaacaatttatgatgttatattccgcataagtaataacgatgttgcttttaaatataggatgtatccgcaaggtgagacactaagttgcgtgattaagaaagaagctacaggatttgcgtttcctgacggaaccaccacttttctttgtccgcaaagtaaaccgatgggaggatttgcccgtacttctccaagttatgagacgtcttatacggcagatgatgccgcagggaagaatggttggggagaaggatacacatttccctgtctattccgtaatggagataacggttgggcgcttgtttccgaaacgggagtaaatggcggatattgcgcaagccgtctgttgggacacaaagaaggggtgtataccattggatttccgcaagaaggtgaagcaaatgggaatggtacggtttctccggggatagcgttgccgggcgagacgccttggcgtactattactgtgggcaagactttggctccaatagtggagacaaccgttccttttgatgttgtaaaaccgctttatcaggcaaaaggagagtttacgtatggcaggggttcatggagctggattatcggtatggatggaagtactaattataaagagcaacttcggtatattgatttctcggcagcaatggggtatcaatctgtgttggtggatgccttgtgggataaacaaataggacgtgataaaattgaagaattggctaaatatgggaaggacaaaggggtagctctttatttgtggtataattcgaatgggtattggaatgatgctccgcaaactccgagaggtatgatggataatgcgatagcccgacgtaaggagatgaaatggatgcaaagcattggcatccgtggaataaaagtggactttttcggaggcgacaagcaaatgactatgcagttgtatgaggatatcttgtcggatgcaaacgagtacggacttttagttattttccatggatgtactttgcctcgtggctgggaacgtatgtatcctaacttcgcagcgagtgaggctgtattggctagtgaaaatcttcatttctctcaaggcagttgtgataatgaggcctttaatgccaccctgcatccgtttatccgtaacacggtaggtagcatggatttcggcggtagtgcattgaacaaatattataatgcggataatgctccacggggaagccggcgggtgacatcagatgtctacgcactggctacggcggtgctatttcagagtccggtacagcatttcgctttggcaccgaataacctgaccgatgctccgtcgtgggcaattgattttatgaaagaggttccaactacttgggacgaggtacgtttcattgacggttatcctggtaaatacgtcattcttgcccgtcgtcatggcgacaaatggtatattgccggagtaaatgcgcagaaggaaacactgaaacttaaagttaatttgccgatgttctctaatggagaaaaggtgagactgtttagtgatgataaggcattgcagggtagcgtaaaacaaatagaaataggaaagaaacaagaattgcaattgactattccttgcaatggtggagtattaataaccaaataaccatttaaaataaaagaatatgagaaacttaaaatttttaggcgtatcgtttttgttggcaatcactgccgctacttcaggaactgcacaaaatcctattatacaaacaaaatacactgccgatccggctccgatggtatataacgataccgttttcctttatacaactcatgatgaggatgatgccgaaggattcaaaatgttggactggttactttatacttccaccgatatggtcaattggaccgatcatggagcggtcgcttctctgaagagttttgattgggtgaaacgtgataacggtgcctgggcagaacaagtcatcgaacgtaatggcaaattttatatgtattgtccgattcacggtaatggtattggcgtattggtatccgactctccttacggtccttttaaagacccattgaacaaaccgttggtttggcaaaaggagcattggtatgacattgacccgaccgtatttattgatgatgacggacaagcgtatatgtattggggcaatccgaatgtttattatgtgaaactgaatgaggatatgatttcatattcgggggaaattgtacaagtggaaaataaaccggaacattaccaggaaggtccgtgggtgtataaacggaacgggcattattacatggctttcgcttcaacttgttgtccggaagggattggctatgccatgagcgacaaagctaccggaccatggagtacaaaaggatatattatgcgtccaacagagcggagtagaggaaatcatcctggaattatcgattataaaggtagctcttatgtatttggcctaaattatgatttgcttcatttggaaacattggatcataaggaacgtcgttccacgtctgttgcaaaaatgcattataatccggatggaactattcaggaagttccttattggcaggagacgaaactggaacagattgaaaactttaatccttaccgtagagtggaagctgaaacgatggcttggggatatggtcttaaagctgaaaatcataagaatggtggtttgtatataaccgatatcgataataatgaatatctgtgtgtgcgtggtgtcgactttggcaagaaaggagcaaagaaattcagtgtaagcgcagcttgtgttgaaaaaggcggaatgatagaaattcgtctggatagcactgaagggccggtaataggtagtgtcagtatatcaccgacaggaggactggatatatataaacagatgtcatgccggataaagaatgcaaagggtgtacatgatctttatttctgctttaaaggagagaaaggaaacaaacttttcaatctggattattgggaatttgaatagcttttattcaaaaaaaataagattgtaatgtgcttataatcagtgtaattgtttggacgtgctacaaggggaaagatagatgtaacattgaaaatgaagatgttatttaggaaaagaagcccgtaacataattatgtttgtagttttatgaactggcatatctttgcagaaaagatcagtaattcatatttgattataaagaaaataagaagtattatgaagaatacacaggtaatacaattaatgtcaatcgtctggctctccatatttatgctggggataacaatgatgtcatgtagctcaaagaaagaacaacaattaccggctattggaaaatctgtggccctctttgattatttttcttataagggaaatgatgatttttatatttccaatcctctgtcaggtgaagactatttctataatcctattttgccgggatggtattctgatcctagtgtttgtacaaatggagaaggtgattatttcctagtaacatctacattcacttattttcccggtgttcctatttttcacagcaaagacttggtgaattggaaacagatagggcatgtgttgaaccgtgcttcgcaattagtgaatatggaaggacagaaagtgagtggcggtatttttgctccggctatttcttataatccgtataacaagacatattatatggtaacaaccaatgtcggagccggaaatttctttgttaagacgcaagacccgtttggtgaatggtcggaacccatcatgttgccggaggtcggaggtattgatccttctttcttttttgatgaagatggtaaggcatatattgttaataatgatgaggctccggataataaacctgaatatagcggacaccgtactatacgcatacaagagtttgatgtgaaaacagataagacgatcggttcccgtaaaattcttgtaaacaaaggagctcaaccggcagacaaaccaatttggatagaaggtcctcatttatataagataaatggaaagtacttcttgatgtccgccgaaggtggaacgggaaactggcattcggaagtgattttccgtggtgattctccgatgggtaagtttcttccatggaaaaacaatccgattctgacgcaaagacatttgaattctgaccgtcctaattcggtaacctgtgctggtcatgcagacttgattcaaacaaaagagggagattggtgggctgtttttctggcttgtcgccctattaataatcagtttgagaatttgggacgtgaaacatttatgatgccggtgaaatggagtgaagacggattcccgtacatgacacaaggagatgatttagtacctatgattgtaaaacgtgaaggtgcgaaacgcgatacgacagttacttatggtaatttcgagttaatagagaactttgattctcctgtacttgatatgccatggatgactttaagagcttctgcttccgatttatattcattgacggaaacacccggatacctgaccttgaagtgtgcagatattagcgctacggaaaagaaaactccggcatttgtttctcgtcggttacaacatcataaatttgaatgtgctacccgtatgttgttcaatccttctaacgataaggaaacagccggaatgttattgtttaaagatgagacgcatcaatatttcttctgcttgaataaagtgggtgagaataaaaatatttctctgaaacaaatcggtgaaaaggaacagacattggcttcagatgaaatagacgcagatacaaatgaagtatatttgaaattagtatctcaaggaattggttacgatttctattattctattgatggtgaaaaaagctggaaactgctttgtaaagatgtagcccccagttatctctctactacaacggctggtggatttaccggtactacaattggattatacgctacttgcaaataattattttttttatataaatataatgctagtaattatgggtgatatttataatgatggctaacgcacttaaaaaaagaatgatgattagaaaacaatgtagttaattaacatcttaaactaatggtaatgaaaaatgtaacgaagaaaattcaaaagattccttacttgtttctccttatgttgtttagttttgtaacagcatcagcacagaaagggataacggtgaggggaacggttcttgacagtaatggtgagacaatcattggagcctcagtagttttaaagggtaataattcaataggtacgatttcagatatagatggaaattttgtattgaccgtacccaatgagaagtctacccttattgtttcgtatgtaggaatgaaaccacaggaggtaaaagtggtttccaaaggtctttttaaagtggtgttggaagatgatactaaacaactggaagaagtagtagttgtaggttacggacaacagaagaaagcgagtgtggtaggtgctatcacgcagaccactggaaaagttttggaacgggcggctggtatttctgatattggtgcggcgttaaccggtaacctgccgggggttataacgactcaaagttccggtatgccaggtgaagaagaaccgaaaatcacaatacgtgggactagttcatggaataatagtgacccgttggtactggtggatggcatagaacgtccgatgagcagtgtggatattgcttctgtacaatctatttctgtcttgaaggatgcttctgcaactgctgtttatggtgtgaaaggtgcaaatggtgtcattttggtaacgactaaacgcggaactgagggagctgcccaaataaacatagcagccaatgccacgatgaagataccttccaagcttcctaacaagttggattcttatgatgctttgatggcacgcaatatggctattgagcatgagttgagcttgtatccggattcatggtcgtacataaagccgcagtcaataattaataagtatcgtaatccggcaaatttggaagaagcggaacgctatccgaatgtggactggcaggatgtattgttcaaagactatgcgatgtcctacaatgcaaatgtgaatgtcagcggtggaactcggtttgtaaaatatttcgcttctgtcgattatgtgcatgagggggacttgttcgatgtatttgataatgggcgtgattataattccggttatggatatgacagaattaatgtacgtagtaatctggattttcagataaccaagagtactgtttttaaggttaatgtagcgggctctaatggatacaagaaaactccttataataattccaattatgatagctcggccgactggtcgattgcccagcagtgggcgggggcgtataatattgctccggatgtatttcttccaaaatattcggatggttcatggggatattatccgaatatttcgaatgttaccaattctgcagaaaatgtttcattgggaggtacgatgactaccactactacacagataacaactgactttgcattggaacaggatttgagctttataacgaaaggattgagtgcaagggctatggtttcttgggataatacttttgtagaatggaagcgcggtatcaatgacctatataacgacgcacaacataaatggattaatccggatacaggggaggtcagttataaaaagtcgtatgacaacaatacaggttttgattttatgcagggtgtaatgtggaatacggaaggtggtgaagtcaagaattgggcgacacagcgtaaccttaattatcaggcacagttaaattgggcccgtagttttggaaagcataatgttacccttatgggattgttcagtcgtcaagaaacggctacaggaagtgaaattcctcactatcgtgaagactgggcattccgtactacttataattgggcggataggtattttattgaatataatggtgcttataatggttccgagaagttcagcaaagaaaatcgttttgcattctttaattccggtgctatcggatggatggttagtgaagaaccgtttatgaaattcttgaaagaacgcagaattttggatatgttgaaaattcgtgcttcttatggtgaaatcggtgatgataatgtaaaaacacgttggttgtatatgaaccaatgggcttacggcggaacctcgtctttggatgtagatcgtggtgaaagtccatatacttggtatcgtgaatcagcagtaggtaattctgatgtgcattgggagaaagtaaagaaattgaattttggtattgattactcttttttggatggtttgtttgcaggtagcgtggaagtctttcgtgataaacgtactgatattctggtgggtggaagcgatcgggctattccttcttattttggtactacagcagttactgctaacttaggtaaggttagaaccaaaggttatgagttggaacttcgtatcaacaagacattttccaataagatgcgcgtttgggctaatatgagcatgacccatgcggaaaataagatacttgaaaaagacgatgctccattgttggctgggtatcaaaaggtggctggttatgccattggtcagaataaggcatatattgataatggatatttgaattcttatgacgatgtgattggtagcccgcagcatgatacaaacaattcacaacgtcttcccggagactattatattgtcgatttcaatggggatggtgtcgtcgacagcaaggaccaagctccttacggttactctgatactccacagaatacatataatgctactcttggctttgagtggaagggatttagtgcttttgttcagttctatggtgtaaacaatgtgactcgtgtcgttcagttgaccagttttggcagtcagatgaatacggtgtatgaccagggtagctggtggtctgaggctggcgatgcggccgatgttgtaactccgcgctggttgtcaaaggtgagcggttacagtaatggtacgcaatactattatgacggttcttatattcgtctgaaaaatgcagagatagcctatacctttacagatggatgggtgcgaaaactcggggtgaaaaatttgaagatttacttaaatggaaacaacttatgggtatggtctaagatgccggacgaccgtgaatcgaattttgcaggttcgggtaatcaaggggcgtatcctacggtgaaacgtttcaacttaggtgttaaatttacattataatcaaagtactatgagaaaaatatatagaactcttttatgcggtagcttattgctcttctcgttgggattttcatcttgtgaggactatctagacaaggaagctgactctactgtatctgaagaagaagcatttaagaactttaggaattttcaggggtttatcgaggaaatatacaactgtattcctgataaggagaagaacaattatactacttcctggaactggggagatgatgaaatattcaacccggaaggtgacagccacatgacgcatcaggtcgatttgggtaacttccgtgcatggtctaccaataatcaatgctggctctatcgtaccggcagtgatcctacggctacttatcatccgaacagtgacggcaatgctaagtttaaacattcactgtggccacatgcatggtattgtatacgtaaggctaacatcggtatcgctaatctagaaaggttaacggaagctacggatgaggagaaaaaactgattgccggtcagctttattttttccgcgcatggtggcactttgaaatgatgcaatattttggtggcttgccttatattgatacagtcttatctgctacagagaaaatgtctttgccacgtctgagttatcaggaatgtgcagataaagcagcagtcgatttccgtatggcagcggatttgcttcctattaattgggataacacaactgttggcaaacaaaccgcgggtaagaatgatttgcgtatcaacaagattatggcattaggctatctgggcaagaattatctttgggctgccagtcctctgatggaacatggtgcgcagctaggtggaagcaatacttacaattacaatacagaatatgcaaaaaaagcagcagaggcattcggagagttactgacacttgtcgaaagcgggcagacgcaatatgcattggcgcagtttgattatagtgatatttataatcataccaaatcggcatctgcttctaatagttattctgaaatattctatactactggtcagaactggaaaatgccgggtactacagaagctattttccgtggtccgtccgaagacttcaacggtagtaactggaatatgaccaagttgtggggacctaaaatttatggtttggttgaacatgataatatcatccaccaacctactgccaactatgtgaatttatatggtatggagaacggtttgccattgagtgaagatgaaacaaaatccggttttagaaagaattttccatttagaaatcgtgatgcccgtttttatcatgacatagtgtttgacggattccattatgtcaatgcagctattcctgaagcagacaaggaattcttacgctattgcactctgtatacgggcggagctatgagagccgtggccaatgctagccgtaccggctatttcatccagaaattagtaccgcatcaggctaataaatatgacggactctataattggtcgggtaacctgcatacatatttaccttacatgcgtttggcggatatttatctgatgtatgctgaggcttgtgcggcagtagacggtgctgcaggtaaatctacgaattttggtaaaacggctgaagatgcgatcaatactttgcgtaaacgtgcaggagtaggccctgttggtggaggggaaccgggtgatgaaaaaggtactctttgtccggaatatatttccaattcccagaaatttatggatgaagttcgtcgtgaacgtgctgtcgagttgtcttttgaaggtttccgctttaacgatttgcagcgttggttgctgctgaccgaagagccctatactattaagacttcacaagaattcgaacgtgtagagaatgaagacttttataagaataatgatccggcagaggcagaagtgagaaacttccgtgaggagactattttgaaacgggtatttggaacgaagcattactggttccccttattggataatgacgtgtatctgtatgctgaattcccgcagaatccgggatggtaatcccttatggttactgaatgtataattataaatgaataaacaatgaaacatatatatagaagattcattctcagtgcagtgcttgtttttccggttgttatttctgccggtgcacaagagttggcaggggataatgcaagttcgctgcaaaacgattcgttggtgcaggtggctttccgaaaggtttctcagaacaatttattaggaggtgcctcagtagtaaatgtagaggaattgacgaagaaaaattacaatacatggagcttgaccgatatgcagggatatgtcggtggttataatggtaactcattgtggggaatggatgaaaagctgatattggtggacggggtacctcgcaatattgattatatttctcctacggaaatcagccaaataacctttttgaaaggtgcgcaagctgtggtgctctatggaagtcgtgcggctaaaggagtaattatgattacaactaaaagaggtaagagtacggatcttcaagtagatgtacgcgccaatacagggttttatgtcgcaaagagttaccccgaatatttaggttcggccgaatacatgactctttataatgaagcacgtgccaatgacgggctcggtgctctctatagtgcggaggatatttaccattatggatccggtgagaatccttatcgttatgctaatgtgaatatgtattcgtcggactatatcaagaaggcatataatcgttcggatgttacagccgaaatttcgggtggcaatcatcgtgcccatttttatacgaatataaattatcttcgttccaatgacgttttcaaaatcggtgaagcgaagcataatgggaccaatggtttaaatattcgcggtaacgtagatttgacattgaatgactttattacagcttatgtgaatgctaaagtatctttctattcacgtcgtagtgccaatgggtcttattattggagtgcggcatctacattgcgtcccaatcgtatttctccgttgattccgttgagttatattgatgcaaatgcagccagtgcatgggatttggtggcgaatagcaataatatagttgatggaaaatactttttggcaggaacacaatctgatatgacaaatgtatttggcgattattatgcttcaggttatagcaaagcaacagatcgttcgttccagtttgatgcgggagtgaacattggtttggacaaggtgttgaaaggactctcttttcatactcggttttctgtagattactctactgcttatattacttcttataataacagctatgccacatatgcgcctacctggtctaataatggcgggaaagatattattgtcggtttgacaaaatacaatgaggataagaagtccggtgtgcagaatatcagcggcagttcggataaccagactgttttattctccggccagttcgattacgaaaacacttttaatgatgatcatcatttggctgccatgttaatagcctctggttatcaacaaagttattcaggagaatatcataagacaagcaatgtaaatttgggcatgcagttgggatataacttccgcaataaatattatgccgattttggtggggctgttatacattctgcaaagttggctccgggacatcgtaatgctttctcaccttctttgacattgggctggaaattatcaaacgagagctttctggaaaattctccggtagtggacgaactgatgttgagtgtgtccggtagtatcttgaatacggatttgggaattgacaactattatatgtatgatggttattacaaccagtcggacggtgcatggtggggatggcgcgagagtgtatccctacactctactaactccaaacaaggggcgaatgaagacttgagctttatcaagcgtaaagagctttcagttaatctgaaaacttctttatggaaccggatgataacagcggatgcatctttctttgttaattcaatcgaaggtaaaatcgtgacttctactactcagtatccggagtatttcttcacttattatccgactgcttcgtttcgtccgtacatcaactacgataatgaccgtcgcatgggatttgatttcaacgtaaactacaacaaacgtttcggcaaggttgattttacagcgggcgttaccggaacttactatacaacgaaagctaccaagcgggatgaattgtatcaggataaataccaataccgtaaaggatatgctgttgacggtatttggggattacagtgcatcggattcttcaaggatgagcaggacatcatcgattctccagaacagcgtcttggcggtacaataagaccgggtgatttgaagtatgtagatcagaataatgacggtataattgatgataaagatcaggtttatctggctcgtggaggttggtatggagctcccttggcgttgggtataaacttgactgctaaatggaaaggattaactttctttgtattgggtacaggtgagtttggcggacatgccatgaaaaacaacgagtcttattattggatatccggtgaagataaatactcggcagtagtccgggggcgttggactccggaaacggcagcaacagctacttatccgcgtctgactacagaaagtggaactaataacttttattcttccgacttctggatgtataagacggatgctttccgtttggcaaaaatacaggtcacgtatgacctgccttccaagtggtttaagaatagttttgttcatggagtatccgcatatatcagcggttctgatttgctcacaatatccaaggaacgcaaggcgctggaattgaatgttggctccagcccgcaatgccgcttctataatttaggtgtgactgcaactttctaatacagattatttcaataattaaagaacgaaattatgaaaaatatattcaaattattggctttcttacctctgctgactgcttgtgacgatttgtttgaaccggcactagagaacaacagagatcttgaggctatgtataaagaaccgagctatgcgcagggtatacttgcgaacgcttatattatacttccttacgaaacttcacctacaagtgacttggctacggatgatgctgtgactaatgagatttccagtaactatctgcgaatggctacaggttcctggactgccaataataatccggtttcccagtggcagaatcgtttcaatgctatccagtatatcaatctttttttggagaatgtagataaggtagaatgggcaaaagatgaacgtatctctaccatgtttcttgatcgtttgaaaggagaggcttatgggttgcgtgcactgcatatgtattatttgttacgtgcacatggtggcaagattgcggacggcacattgatgggagtacctattattttgaaatcggaaggaccggatgcggattttaatcatgctcgtgccacttattccgattgcgtgaagcaaataatggaagatgctgataaggctatcgaattattgccgctcgattataagaaatttgcagatagtgagataccggaaaaatataaaaacatcggtgtgacgaatgcgagtgattatcggcgtgtttgtggtgaagaatatagagggttgatgagcggacggattgcattggcagtccgtgcacaaacggctctgttagctgccagtccggcattccaaagcgggtcgggaatgacttgggaacaagctgccgattatgctgctgaaattatagagaaagctaacggtggcggcggctgcgggctggatgcagatggattggagtggtatacacttgcggataaagattatggaacgggcggcagtcccgccgaggttatttggcgtagtagtacagatgataataatacattggaaacagctaacttccctccatcactttacggaaacggtcgtgtcaatcctacccagaatttggtggatgcctttcctatggcgaacggttaccctatttctgaaacatcaggcaattacgatgcagaaaacccgtatgataaccgtgatccgcgtttggcaaaatacatcgtttacaatggtagcaagcaaggtcctagtgatacggaaattattacaggaacttacggaacgaatacagacgttgtgaataaggaaagcggaaggtctactcgtacaggttattacttgcggaaactattgcgtaaagagtgtaaccctaattcacagtataatacaaagaagaagcattataccgcacgtatccgttatacagagatgtttctgatttatgcggaggcggctaatgaggcttggggaccacagaataatcatggacatctttttagtgcttatgatgtaatcaaagccattcgtacgcgtgccggtttaggtatcgataatggagatgcttatttggagagcataaaggataataaagacaagatgcgtgaactaatccgtaatgaacgccgtatcgaactttgttttgagaatttccgtttttgggatttacgtcgctggaatgttgatttgaccaaactgaatgaaactgctcttggggtggaaataagcaagaatggttctgtaatgaactactctccgcttacggtagagaaaagaaagtatgaggagtatatgatttacgggccaataccttttgctgaagtaatgaagtggagcaatctggaacagaatgtcggttggaaataattgtaaaataataaataatgaagcatatgaaattaattaaattaatatttgccatgtcagttggagtctttgtttcatggacgatgacatcctgtgaaaatcaagataatgaatttcctgattatgagggcggcacttcagtctattttgcaacccagtatccggtgagaacgttggttatgggtgaagatgagtatgatacgacgctggacaatgctcataaatgtaagattaatgctactatgggcggtgtttatgctaataagaaggatatcacgatagatattgaagtagacaatacattatgtgataacctttattattcgtatacttctgcatctgaaaatgtgccggtaaaagctatgccttccaactactatacattatctgatgataagatcactctgaagaatgtattgatggatggtgtggaagtctcatttactgatgctttttttgctgatcccgaagcattgaccgctacctatgttatacctttggtaatgacaggtgtgactaatgctgaccgtattttgaatggtactttgtccgaaggggcagaagccgtcagatgtaattcgtcagtgtggttggtgcaaccacaggattatgtactttattgtgtgaaatacatcaataaatggactggtaagtatctgcgtcatggcgtggacaaagtgacagaaaacgggacaactaccgagaatgatcgccataacgagtatgtagaagatgatgaaatatgtcagactgtaacaaaatctttgactgaaaccattcttacagttactaccaatttagggacaacagacaatccgcgtaatatcagttataagttgctgctggtttttaatggcgatgaatgtgtggtttccgggttggacggcgttacggctactggtactggtaagtttgttcaagacggtgagaagaatagttggggtaataaagaccgtgatgccatttatttgaagtatactgtggatttcagtaatggattaaagcttgaaacagaagatacactggttgcgcatagtcgtggcgtggcaagagaagattttacgccgatctatgtgaagaattaatcgttaaatctagaagaatatgaaatactataatagaattttactgcttgctatggttgccggaataactgtatcttgtgcagatgcgctttttgcggactacaagacagagaaaccggagagtctgaaaaagtatgagtacttgaacgaatatggtgatttgaaaacatatattgaccgtatctcccatcccgacttcaagttgggaacgggggtcacggtgagtgatttcttgaagcaagatttggtttatactttgactgtcaacaactatgacgacgtgacggctggtaatgccatgaaatatagctcctgtgtagatgccaaaggaaatatggatttcggcacagtcaagaagtttgtgaaaactgcaaaagaaacaggaattagtatttatgggcatacgctctgttggcattcacagcagcaaaatgcttatttgaatgggctgattgcggataaagaaccggaaccggttcctggtagttcagaaatcgcacttcatataaaaacctcgaaacctcaagcgaatgtatgggattgggaattgtattatgatttggatgaagcattaatagcaaatcaagaatatactataagtgtgcggatgaaggcttcttcggctataacctttccgttctggccggggaagaaagatgggactgacactcaatatggtgcagggaccttttcagcgggtgagcaatggtcaactaacacattcacgtttacgccttctgctgatatcgataggttacggttctgtttcggtttgtttggcggtgatttgtattttgatgatttaacattgactgcctcgggctctgatagaaatttgattatgaactctactttcgaagaaagcaaagatctgtcccgatggagtaaagcgagttggattgattttgcttatgggatagaggaggtccaggaaagtggatccgtgttaactaatgtatatatattagaggatgacttttcaagcggaacagctatgatgggttggggaaataactcgactcggcaggtgattgacggagtacatcaaatgacaaatccgtcggaagtaaattcttgggaggcacaggctggctatgatttttcagctcctttgacagaagggactacctatttcttaaagatgaagattaaaggcagtgtagcaggtagtattggagcggtctttcaaaaaccggacggatttgccgggcgtggtgacttcccttccataccaattacaacagaatgggaagaggttactgtatttaccaactgcacgggagatgcggctactcgtattctttttaattatgggaagtatgccggtaccatctatattgatgatttgtctatatattggcagaagtcgggtaatacgattcctctgactcctgaagagaaagaagaaatcctcacgaacgaactggaacgttggattaaaggtatgttggaatcttgcggtggttatgttaaggcatgggatgtcgtgaatgaacctatttccggaaaagattcggatggggatggctattacgatcttcagtcagcttctcaaacagatgataatggtgtttccggtgaaaacttctattggcaggattatttgggtgatgattacgcccgtattccgattaagtttgcgcgtaagtattttgcggagtccggtggtaaccctgatgagttgaagctttttattaacgactataatctggaatccgactgggatcagaataagaagttaaagagcttgatacattggatcgaacgttgggagtctgacggggaaacaaaggtggacggtatcggtactcaaatgcatgtgtcttactatatgaatcctgctactcaggctagtaaggaaaacgccattatcaatatgtttaccctgttagcttctaccggtaagctcataaagatcacagaattggatatgggtattgtcgatgcagctggtgaaacgatactgacagagaatctgacagacgaaatgcagcagaatatgtctgatttctatcagttcattattgagaaatattttgagattattccggtggcacagcaatatggcatcactcattggagcccgacagacagcccttctgaaaactccttctggagaaaaggccagccaattggtctgtgggatttgaattacaaccgcaaacctgtctatgtcggtttccttgaaggtttgagaaatggtactgccagtaaataaatgagatagaaaactatcatgtagtttatgctgatttagattaggcacgctcgtccggatagcggagtctctcgatagagctccgctattattttaaatagatgtaattaaatagattgatgaaattatgaaaagaataataggtatattaactttgtcttgtctgttgttttctgcttgtggcaaggatgaaattccgcaagaggaaaacgaaaaaaaaacagaagaaacaacacccggtgatgataccggcggtgatgaatcggatgatgatcctgattctccgaagctggttgttcctttacatgtagagggacgttatctgaaaaatgaacaagggaaaattgtcaacttgcatggatttacgcagacttatagtccttattttaataacaacgcatggagtaattatgatgtaagcagttgtcttagctataacaaaagtatggtggataaaatactggctgccggatggaaatttaactttgtacgtctgcacatggatccttattggagtgatgatactacgttgccttatgtgcgttatgaaggacatgaacgtttctcggaaacacgtttcaagaagtacctgaaagagttatttgtcccaatggcggaatattttatttctaaagggatgtatgtggtgatgcgcccgccgggagtttgtccacatgcaggtgatactgaagataacaggtatctaggtatagagttgggagattcttatcaggagtttctgctgaaagtatgggacattgtatcgcagaatgctgttgtgaagaataatcccgggattatgttcgagttggctaatgaacccgttcatataaaaggtacagacggtaaatatggtggtgacggtgatgcttgcttcatcaatatgcaaaagtattttcaggcgattgttgataaaatacgtggaaatgcttgtaacaatatcatttgggtacccggattgggctggcaatctcagtatagtggctataaagaccatcgtatcgaaggaggaaatattggttttgccgtacactgttatccgggctggtatggaagtgatgccgaacaggacagtggtgaaggaaatggctcctctacaggagggggatatgaacctttccaacgtggttgggacaagcaagtaggtccggtagctagttttgctcctgtcatggtgactgagatagactgggcaccgaagaaatatgatgcaacatgggggaaaagtattacgggagtggcgaaaggcgaaggttttggagctaatttcaaatacatagccgatcaatccggcaacgtttcctggctgttctttactacaaagtctcatgaattggctgcttttaaggatgtagcgggtgaaccgggaaactatacttttttgaatgatccagaagcgtgcccgtgggctatttatcactggtttaaagagtatgccgaaatggatgaataataatatcagttttgttacaagatgaagaagattatattattaagttgtttgttatgtgcaggcatatttgcctttgcacaagaccctaatttccatatttacctttgtctgggacaatccaatatggaaggaaatgcaaagattgaggcccaggatacatgcaatgtcaatgaacgctttctgatgatggcggctgttgattgtccgtctttgggacgcgtcaaaggacaatggtataaagctgttccaccgttggtacgttgccatacagggttaacaccggccgattatttcggacgtacattagtggaaaggctgcctgataatattaaggtaggtgtcatcaatgtagctgtaggtggttgtaggattgaactgtttgatgaggagaattgcgaagaacatattgcctctcaaccggaatggctgaaaaataccgcgaaagcgtatggtaataatccttaccgtagactaaaggaattggctgtagaagcacagaaagccggtgtgattaaaggtatcctcttgcatcaaggcgagtctaataccggtgataaagagtggcctcaaaaagtaaagagagtctatgagaatctgttgagggatttgaatcttcaggcaaaggatgttcccttactggcaggagaagtggtacatgccgaccagaatggcagatgtgcaagcatgaatgagataatcaatacgctaccgcaagcgattccgactgcgtacgtgattccttcttcgggctgttctgccgcagaagataatttgcatttcacggcagaaggatacaggaaattgggagtgcggtatgccgagaaacgactccttttgttggagaaggaaccaaactccgggattactaccgaaccggcatccactaatattccgggatatgactatccccgggtggataaagaggggcgtgctcattttcgtttctatgctccgcaggctaccaagctacaagtggattgttgcggaaagaagtatgatatgtggaaagatgccggaggactctggacggcaacgaccaaccctctgcctgtaggattccattattatttcttgatagcagacggagtgtcggtaacagatccttccagctacacgttcttcggttgttgccgtgtggcaagtggtatcgaaatccctgaaggtgaagagggggattattatcgtcctcaacaagtacctcacgggcaagttcgttcctgtacgtattactccgaaatgcagaaagagttccgtcggtgtatggtatatacgccggcagagtatgaaactcatccgaagaagcgctatccggtattgtatctgcaacatggcatgggtgaagatgaaaccggctggagtacgcagggaaagatgaatcatattatggacaacttgattgcatccggtcagtgtgtgccgatgctcgtggtgatggatagcggtgatgtggaagctccgttccggccgcgtccgggaaaagatgtgaacgaggagcgggctttgtatggcgccaccttttatgacgttattctgaaagacctgattcctatgatagaccggacattccgtacgaaaaccgaccgcgaacaccgtgctatggcaggactctcgtggggaggacatcagactttcaatacggttctgcctcatctcgataagttttcttatatcggaagtttcagcggggcgatttttggtctggatatgaagacttgttttaacggagtgtttgcggatgcggacaaattcaataagaaagtgaattatttctttctcggctgtggcacggaggaacaaatgggaacaaagaagatggtggattcactccggaaactgggtatcgaggttgattattatgaatcgcaaggcacagcgcatgaatggctcacgtggagacgttgcctgaaagaatttgtaccacatttatttaaacactgaaaatagcatgaaaatgaaatctacatttattgcagccacattgttgctcgtttcggttatgaccgaaggaggactgtcggcacaaaacccgattgtgcaaacttgctttactacagacccggcccctatggtgcacgacggcaccttgtatgtgtatacgggacacgatgaagacaaagcggattttttctggatgcaggaatggcgtgtatattctaccaaagatatggtgaactggaccgatcacggctctcctcttgccatcgaatcattcgactgggcggacgaccgtgcctgggcagcacagtgcatcgaacgtaatggtaagttttattggtatgtctgcctgcattccaaactttccaatacgatggcaatcggtgtggcggtaggcgattcgcctgtcggtccttttaaagatgccatcggcaaaccgcttcatgacgggagctgggactatattgatcctacggtcttcattgatgatgacggtcgtgcttatctgtattggggaaatccgaatatctattatgcagaactgaatgacgacatgatttccttgaaaggtgaagtgggcaaactggaacaaactgttgagagctttggtgcacccaatccggaaaagcgtgtcaaaggtgttaagtataaagatacttatacagaaggtccatggcttcataaacgggaaggaaaatactatcttctttatgctgccggaggtgtacccgaacatattgcctattccatgagtgacggacctcttggcccgtggaagtatatgggagaaatcatgcctttacaagatacgggctcgtttactaaccattgtggagtgatagactataaaggcaattcttatttcttctatcatacgggtaagctgccgggtggtggaggcttcgggcgaagtgcggcggtggagcaatttaagtataacgctgacggcactttcccgattattaatgctacccgggaaggggtgtcaccggtaggtacgctcaatccttacgaaagggtggaagctgaaacaatcgctttttctgaaggtgtgaagtccgaaccaaatgtgaaaaccggtatatatatatctgaaattcataatggagattatataaaggtacgtgaagtggatttcggcaataaatcccccaaacggttcactgctaccgttgccagtgcccttcgtggcggaacacttgaagtacgtacagacagtataagcggaccattaattgcggaactgactattccttcaacgggaggttgggaatgctggaaaacattgcagactgatattgtaaaaccggtcacaggaatacaagatatttattttgtattcaaaggacgcaaaggctgcaaactgtttaactttgattggtacaagtttaacagataaacatgctagagagcagttgggttactcttcttttttactcaactgctctttcatatacattgaaggcggcattccatacaattctttgaatgttgtcgagaaattattaggatcagtgaatcctgttaacatggctatctcggatatggtatgctgtttttcggacaataaacgagcggcttcttttaaacgtatattacgtataaagtcacgggttgtctggttggtgagctctttgagtttcctgtgaagatgtacgcggctgatacctacctcggtggtgattgtctctattgtcaagttagggttaccgatgttttcattgatcactttcataatacgttccatcaatttctcatcgggtgatttcacttccagtttctgaaccttgttctccagattttgctggcctgtaaatactttgcgtaactgctgccgtgtattaattagattttctaccgtcttttgcagaatttcgatattgaatggcttcatgatataggcgtcggctcctgtattcagaccttcaaggttgtcttcttccctcgttttcgcggtaagcaaaatgactgggatatggttgaggtttacattctgcttgatcttccggcataaggtgagtccgtccatttcgggcatcatgatgtcactaatgactaaatccggagtctttttaaatatttgctctaatgcttctttaccattacggctttccatgatatgaaatttgtccccgaactccttcgctatataatttcggatttcttcgtcatcttctacaattaatacgtgatatttagtttttaccctgactttcttttcttcctcattttctataatgggagagatgacaggaacagttggtacggctactgttaccttttgcttattgttgtcaacttcttcaggtcgtagatgcttgttacccaacggtaatcggataataaaacggcaacccggttgttctttattattttctacatagataattccatgatgtaattccactaatgaacgagtcagatgtaatcctattcctgttccgcctttcggattctgttggctgttacggatctgatagaaacgttcgaagatatgttctttttcctgttcatcgatgcctgttccggtatccgcgataattatttcggcatattgtttcaagggatcgggcagtgtattatcttctcccgtacggatggtaatatctatgtttcctttttcaggagtaaacttgaaggcattagacagaatattcaggataatcttatcaaaattacctgtgtctacccatacattcagttcccggagcgtactgtgaagttgtagccggatattctttgtatttgcctgttgaccgaaagttgtacataaatcctcaataaaaggaatgatgttggtttcccggaacatcaagaacatttgtcctttatcaattttccgaatatccattagttgattgacaagattcagaatacgttccgcatttctgtagataatatgatatattttcaagcgttcattgttctcctcattcttaatcagtttctgtagagggctgatgattagagacatcggagtgcgtatctcatgagagatgttgataaagaactgcaattttgcttcattgatttgttcggcatggatatgttgcagtatttcctgatgcattctgtaccgatgtctgatctgaagaataatgataaatataatggtcagtaataataaggagtagataactttggcccaccatgaagcataccatgcaggagatataaagatggtaatttcttttatatttgaatacacagtgttgtcttttgctctgattttaaagttataggtaccgggtttcagattgctgaatgagatacggtttacacctttgggcaaactaatccatttttcatcgttgatagaataaaggtagttgatgtgttcgggggcatttaattccagagtggcaaactcgatactgaacacattgtctttatgggatagataaaactcttttgcgttgaatacagggcagttgataatattgtgaataccggatttcattccttttctaaccggattgttatgcaggaaaaagtcggtaatccggatattccacgtttttgccggattgataatgtcttgcggattgaaataggtgataccattcattccgccaaaccagataataccttgtttatctttgaaggaggcattcttgtagaactcatttccctgtaatccgtcgctgacataataattgataaatttgttgtttttcttttggaattgggaaattccggcattggtgcttatccaaagaaaatcttttccatctccttgtatggcatatattgtattactgggcaatccgtctgcagtagtataagtggttagttctttcgtttttttattccaaccggataatccttcggaactgcccaaccagacaactccgtcggcatcttcaaagattgaataaataacattttgtgagagtatcttatgactttgaaaatcaggactgtcaaggtctatacagttgacgccgtcataagttccgacatacagcttattatcatcggaatagtggaggcaacctatccattcgttgattagagatgtctgagattgtacggatgtaaattctttcgttttcaggtcatagtagaacaaaccgaatcccattgtcgcaatccaaagtcgcttgtttttatcttctgcgaaatcatatacacgttgtatatagttgttgttcttatctaccagtttgtactggtaatcgcataatcctgtctgtttgttcagctttcccataccgttgataaaggagccgacccaaatgttgtactcggaatcttcatatagttttataactgttgaaggcacagaattagggtgattagtatgcgagaaatgtttagccggttctaacttttctgtcagggcataaattccgtcattgtctgttccaacccataacataccgttgttgtctttgcagaatgaggttatacaactggaaccgattatgtttttatccatggatttatgtcctatatacttgaaactgtttgttcgggcaggtatctgcatgactcctttctgataagcagccaaccataagttaccggaattgtcttttaggatagaatgtatttttgaattttttgaatcaaaatagttgttgtcaaaattgtattcggagatttcatgagtttggttattgtagacactcatacctttaccgtcagttccgatatataattcattttgcggtccggaatagaggaaacagataggaagttctctcttttctttaaaatcaataggtataaaggagtcttgtcttttgttatagacgaatagtccttttctcatacttcctacataaatattcccacgtgaatcttcacatatacttttgacatatccgttgtctttagataaatacaaagtaagttggttattagaatcaagacgatatactccttcttcgccttttgctatccagacattctgtttcttgtcttcaatcataaatcctgttgatgtcatggggatatcaattttttgaacagtcaacaggtaatctttgatattcaacctgcacaacatatttccggatacccatatttctccatttctcctttcgataaaggaaacaatattgctttcaaatatttctccattgtcttcccttattgcaagtggggtaaaattgtctgtggccggatcatacatttgaattcccatatatgtaccgataaacaaatgacctttgctgtcctcaaaaacagtacgaacaaaattgtgggctaacgaatgttcattattgggctcatgtttgtatatggtaaatttagcaccgtcataacggttcagaccatcttctgttgcaatccaaatgaaaccgttccggtcttgatatatttgattaatcagactactggagagctctttgtcagtagtgaataacttaggagattgcccgttgcataacaaagaaaacaataataatagaaaagtgaatacatttttcatagttatagatcgttgtttgttgtacaaagaaaaataaaaacctaaatataacctaataaaagatgaatattttcattaggctccgggagtacaatcagatgttgtaacatcgtttgtgaaaaatgtaacatgagaaaagattaacctcttcttatgtattattgttttcctttcattgtatttacaatatagcttttaccggcttttgtttcgatgtcatattcgtaaaccttctgcagtttgggagactgcgcacttactcctttggctacaagaggttgcttgataggagtggtggcgaataatctatttgagcactctttcccgtttacttgttttaagcctttccctttcaggggaacataagaccggatgcggagcgtaccgcctatattcgaccggatgatcgctttatttaacacattgtttttccagtccatatcgacagtaaagtttccacgtgccaccagccccttcacacttccttcttcccatgcatcaggcaatgccggcaataaatgtacggcaccgtcatgactttggagcaacatttccgctactccggctgtataaccgaaattaccgtcaatctggaaaggcggatgggcatccagcatattgggataggtacgcccgttcggatattctttagccaagttatcgttgggcaatagttgaatcatatttttaatgatttggaaggcatggtttccatccagcatacgtgcccagaaattgactttccagccgatactccaaccggtagctttatcaccgcgttgaagcaatgtgtttcttgctgcctggaataactcgggatttgagtatggagaaatttgattactcggatatagcccgtacaaatgtgaaatatgacggtgctcgtccttgggattgtcaatatcttcaagccattcttgtagttggttatgttttcctatttgcataggtggcaacttctctagtgtttgtttgagggagtcttggaaagagggggcttcacctgcgatgtatgaagccaataaggtattatgcagtgcatcaaaggcaatctggttatccatggtgcaaccggccgtgatgggaccgtgttccggcgacacagaaggcgacactaccaaccatttatacactggatgttctaccaagaaatccatgtagaactgcgctgttcctttcaggatgggataatactctttcaggaactctttatttcctgtaaagaggtaatgttgccagatatgttgagctaaccatgcgccgccgctaggccacatgccggctgctgcaaaatcgactacaccacagattctccataagtcagtgttatgatgtgccacccatccccgacaatcatacatggttcgggctgtttctgctcctgtgacggataaatctttcaacatagagaataacggactatgtgtttcacttaaattagtgacttctgccggccaatagttcatttctgtattaatgttgatggtgtatttactatcccaaggtgcatgagtactgttgttccatataccttgcagattagccggttgcccacccggttgcgaagaagaaatcagcagataacgtccataatggaaaagtagagctgccattgccatgtcttccccatttccgaagttttcaattcgtttgggagtctccagttgggaagctttgcctgccggtaatgtaaggcgtacacggtcaaattgttttttataataagcgatatggcttttgagagctttttcgtaaggtatttgcattgctcttttcagatattcgctggtccggtgggattcattggcgctgacatcctggtagtttacgtagttggttgctgccgatatataaagggttgcttctgttccttcatttatttggagcgtatttcctgccgggcggagagtgccattcgtttttacctggatttgacattctgcccgtagtgcggctttcaaaccttcctgctctttcccttgacaggtgacggtcagcttatcattctgaacattcaccttatgtactagagggaagttatatgcaatagtaaagttcagtgcgtttgctttacttgctttgatatgcataataatgacattatcagtaaatgaagcaaaagtggtgcgggtataagtgacgtcatccacttgataacgggtagttgtcgttgcattctccagattcagatcgcggtaaaagccggatgcgttttggtgttccggaaattccaggtaaagactacctaatgtcagatagctcattccgtgttgctgggttaagaagttggcgtcaatgagtctttgcgcttccttgtttcttccttcaaaaatcagtttgcgtacaaccggtagcacatgtatggcattcgggttattattattgtatggagaacctgcccaaaatgtttcttcgttgagttgtaattcttcgcgttcgattccgccatataccatggctccaagacgggagttgccaatagggagagcttccgaccaattttgtgcaggttgactataccacagtttcaggtcctgtcctgaaacaaggttgcttattaataggaataatacaaaaaaagtgtttctgttcatattgtatggatttgtagcaaaggtagctcatttcccaatacaaaaggcaataaactgtttctgaaatctaccttgaaagtaacttctttccatatttatgttactaatatatatggtgtatgttccacagggtaaaataataactgctggtttctttttgatttattatcagccttgccctcttgtcatatagcttatttgcaagctgattaagtagggaggtataagaagggaagctggtatagttgcgttgggataccggtattgttctatgaaagtaccggtatcattaattccccacggccgtgacaagatcttcccacggccgtggtaggaactcgtcacggctgtgggaagaagctaccacggccgtgaagaattaagtataccggtatcctgatcgaacaatagttattgaatgatataagtatgccggttgtatgacggatgtttaatggaggcttttcttgaaaagtaagtaaagctggataggagatatgggagagcaaaatcataaaataataggctgacaataaaacttataaaatgttattgtcagcctattgtcagggcttattgtcagcgtctaatgtgctggaaatcattcgtctaatgaataggaatgacggctgacaataagaactgcaaaatttatatgtaaatacaatcagtgtgtagtaattgacttgtctctacattgatctttttatctattatctctcttgcttttcgattcattcataaacagataagatttcttatagcctccgtagtctacaaccaacttttccagcacgatgcccggatcaagaggtttgaaaattagtgtctgcatgccgtctgatgtattcggcacattcagtttgacctttttctcgacgatacgtcttgcaactgtcggatagtatatgctgtatacattttcaggaagctcatttaagttatgattgaaattgatagtctgttccttcgctccttcgaatccgatactgtactcatgtcctttccggtcgtggaaagcaagagtcgatttcactatcacgtgaacagtcactttgtcgactcctttgggcaactttattttgtaggagatagaagctccgttggtcggttgggtataaggcatcagagccatgccgctgagggtacgccccatataggggatcactgtccattccgtacttggtgctgctttagtgctgtaatagtgttcggcttctatggctatatatccgtcttgtccggtgaatacgtattcaccgacagccttttccggattttcgattcggtaggtttgtggtagtgtatcagcggggaaattatcattccatgaggtataaccgatatgtttctgaatcatcatgttcttccatttgccgccggacataacgttgttataatcgtcactcaacgctttatcccgtgcaaaagcctgttccactttatctgcccattcgttagcttgcggattgttttctttgtacaatttatggttcatggcttgtgcataatacatctcgtacaggtttgccatggcttgaacagggaagaggattaattgcttgtaggcatctttatattctggtttcaatgatatgtattgtctcaaagcttccgcttccagtttcagatattcatcagatacttgtttccattcgccggtctccaggttataagtattccggtcgagcatttctcccgttacgcgaccgttatatttgctgtacaggtttaagattcgcatagcttcatccgcttgatcttcgccaaactgctgtgcgcagaaacgacggggatgatccagcaagttggagacgttgaattgcttgggattccatgccatatccatgaagagcgtgatcggatattccattggtttcaaatcgcctacattcagtatccacagcttttctactccgtaatcgtatgtgagttgaagttgctcccacatattttgtataggggttacgttcagccatttggagtttctcggagcacctacgtagtctacatggtaatacatgccccaaccgcccggatgcttacgttccttggcatttggcaggcggcatacatttccccagttgtcatcacacaatagcatgataacgtcatcgggtacacgcatacctttatcatagtaatccagtacttctttgtatagtgcccagacttgcggggttgctttggcaggtcgtttagtcaccttttcaatgattctgcgttggttctttactatgtcttccagcagtttcacgttggtgttttcgctcatggctgcgtcaccgtctccgcgcataccgatggttacgatatcttctgtgccctgcatccgttcgataccttcacggaaaaactgatcgatcacttttttgttagttgtataatcccatgcaccatattctttgcgcttgcgtgaccactcctgatggttgcgtgccattggttcgtggtgggatgtaccgatgatgattcccatttcatcagcagtcttactattctccgggtcgtctgcatagaaagcccagctccacatggcaggccaaagaaaattacctttcaggcgtaatatcagttcgtaaacttgtgtataaaaacggtggtcaccgtagtttgtgccgtaggtttgttttacccaaccggtcagacagggcgcttcatcattcaggaagataccgcggtaggtcaccgcaggttctccgtctgtatactgtcccggctttacatatacattctgttgctttcggatagggacgtctgcccaccaataccaaggagatacccccatttgttcagacagttcatagataccatagatcgtaccgcgtctgtcgctgccgatgataaccactgcttcatctactccttcacagggattagtgacaacttgcaggatatatttctcgtttttcccttccagctcttttttatctattttgtttgcagctatcagtttttttacaaaaggagtactataggtacctacaatgacacagtgtttcgaacttacgtttgttaagagcacaggcttcgttccgcatacttgcagtatatcttgttgaagattgccgacagctatcatcactcctttgtcttcggaagaatctacatatatcggacaaggaactccttgggatatcaacggaaaatgattatcggtcggtgtgaatactacgaattgttcagcggcaaatgctgctatactcacaacagagaggtagaagaatagaaataatcttttcatggtttcaatatttaataatttgttgttaatcattgatcttacgtttcactgtaaccggatattctactttgtagataattggtaattgaaaagtatataacagcaggctcaaaatgatgcaaatatccttcttcataaatactatatttaatgaaattatcttctttgtgtcttaaattccaaaaatggtttatttttgtctgtactgtgacacgatgcaaagatagttggtattgataagaacgggctttgggtatgtttcaattatttatactgttgataccaatttactttttcttgaagttttttcttcggagataaaatgaagaagtgtgaacaaaccggtttgttcaataaatgtttttgattttgtttcaaaatctttttgtattgtatctatgaggctgtcggatgaataataatggttaatgtgtcatattccgtattaataagattggtatgtgatgcgtataatataagttggttaaacaagagtaagtagagattttaatgatcttgagaatatcggtaagcgtcaattgcattcttaaccgaaccgtgtaacagtaacaatttttgtgcatggtcatgatttaatcctagttcctccataatcatcctggtgcctctttctaccagtttatgattactaagctgcatgtttaccatcttatttcctttcacccgtccgagttgaatcatcaccgacgtactaatcatattcagaatcattttctgtccggtacccgatttcatccgggaactgcctgtcacatattccggccctacaatcatttcgatggcgacatttgcctctgccgccattggagaatcgggattgctggtgatacaacctgtcaggacaccgtgtttacgggcttcccgcaaagcaccaattacgtacggggtagtgccggaagcagcaatgccgataacggtgtctttttcgttgatctggtgttcgacgagttcttcccaacctcgattttcatcatcttcggctccttctaccggattgcgcagggctgtatcgcctcctgcaatcagtccgataatccagttgggagacattccgaaagtaggaggaatttcggaagcatccaatactcccaggcgaccgcttgtgccggcccccatataaaagatgcgtccgccttgtttcatgcggggcacaatctgattgacaagctcttcaatttgtggaatagccttttgtacggctaatgctactttctgatcttcctggttgatatcttctaatatctctcgcacagatttcttttccagatgatcgtaaagtgacggttgttcggttatctgcatttttataattactggttataaattacaataggtaaaagaattattgttgatggtattgaatcagcccttccatcggactttgaagaatcttaccgatctgaatacctgttgtttgcgcagcctcctgcaaaatctccttgtaacagtgagctacggaaccaataaaatgtaccggatattgcttataatcatattgcatcacgtttctgcggagaaaagcgataaagctgttgagtactagtgaacggatagccggttcttccaagtgctgtgcaaggaaaggggagagactggccagaaaacggttcgggaaaggctggcgataaacccggtcgatgatttcgggagccgtcaggtcgaactgttttaagaaagcttctttgatggcgggtggaagctggtttttcagtacatcgcctaccagtagttttcctaagactgcgccgcttccttcatctcccaggatgaatccaagaggggagatgttgttgacaatctctttaccgttgtagaaacaggaattggaacctgtgccgaggatgcaggcaatccctgcttcatgtccgcatagtccgcgggcagcggcaagcatatccgagtaggctttgatgttcccgatgacgggcaggctgtcggcaatagcccgccggaggacgggagctttttcgggagtgcatcctgcaccataaaaaaagacggagttgatcgttccttccggtagttgtggtagaagggaatgtgtcagctcttgttgaatttcttcttctgattggaagaagggattaattcccttcgttcccattcgtttgattggggtgccgttgaaaacgatgcaccagtcggtttttgtagaaccactatctgcaatgagtatcatatctttgagctttttattgtttctttccgaaagaatcctccagtcggttgcgaatcattaatgaggcgacgataccgggcagggtacaaatacaaacccagataaagaagtttgtgtatccgagatgctcctgtatccatcctgcaggcatccccggaagcatcataccaagtgccataaacccggttccgatagcatagtgcgccgttttgtgttcgccttccgcaatataaatcagatatagcatataagcggtaaagccgaaaccatagcccagttgttcgatagctacgcaaatggctataaatataggattatccggagtggcggcagccatccatacatataatagatcaggaaggttgatagctaacgccataggtaatatccattttctgaatccgtcgcgggaaacgaggaaaccactgatgattccgccaactaataaagctatgacgcctatagttccatagatcattccgacagttgcggtagataaagctagcccacctttatcggtagcatcgagcaggaaaggagaagctattttggctaactgtgattctcccaaccggtaagtgagaaggaaaaagaacatgagacccaggttctttttcttgaagaaggtgacaaaggtcagaagaaaatctcccaacaatttacccggtgtgagtccgggacgtttaatgtccaaatcaggatgggggagaatcagacgatgatagatagtaagagcaagaaacaatcctgcaagaaggtagaatgtaatactccatgccaagggaatattgttttgtgatgtttccaaccatcctgccagcatgacaagaattccctgcccgaaaatgttggcaagccgatagaaggtattccggataccgacaaagaaagattgttccttattattgagtccgagcatatagaaaccatctgcagcgatgtcatgtgtagcggagctgaaggctagcaaccagaaaaaagcaagagtcaactgtacataatgtgcagttgggataaagaaggctatccctgcaaatccggcggcgatgaaaccttgcatggcaataatccaagcccgttttgttttcaccagatcgacgaatggactccatagaggtttgatagtccagggaagatagagccaggaagtgtataaagctatttccgtattggataatcccaaacgcttgtacatgataacagcaatcgtcattaccgctacgtatggcagcccttctgcgaagtagagggtaggtatccagctccagggatttctttttatagtgggggttgtcatggtattattcttttttattgatattgtttctcgagcgtactgccggggtaatagtgagacagtatttcttcatatttgtaaccttgctctcccattacggcagcaccaatctggcaaagtcctactccatgcccccatccggctccggtaaggatgaatcgtgaagggattttatcctctttatgtcctttttcctcatattccttgtctactacgaaggcggaactatacagatgggaagtagataaggtacggcgtatttccagttctttcccgataataagcgttcgcaaggttcctacaattttcaatcggacaagacgtcccgacgttccacgttctataggaattaaatccagaatttgtccgaagtcaattcccgaacgttgatgaatcagtgttgaaagttcttgttgggtataactgactttccaacgatagaagtctgctgtttcttgatcgtagttgtttagtacttggcttagaattttcttatcctgcgtattacaaaaagcaacaggtgaggtacgtatccatttatcagcttccgcctctatggtcaaatcgggaagttgtttttcagtcttgctatcccgttgtctgattagataaggatgctttacgttttcccaacaattttggaactcttcaaaagctccgccacaacatttagagaaacgggcatcacaaatcgctcctttatacatcagcacttccccccgcgtggcggagactgcttcgatggcttgtggtgttgaggctcgtgtaattccctgataacgctggcaatgatcatcggcacatacatcgaaatttctatgtgcttcatggtcataccacttaataaatgaagaattaggaatgaagaatgaagaattggctgcgctgtctttttgcaaagttcttttaaattcttcattcttcattcttaattctttatttttttcgagtaaccagcttcgggagatgacggcgtgagcctttagtagttctaaagaagctgttgcgctcatctctgatgaaattacactggtaagatattcttcaatggaaatcacattgatggcggttagttgttctccttcgatgataatctttaattcccctttgaatttctggacttctttgcgttcccaatggaagttgattccgatggtcacatctttcagttcaaagaaagcatgtgcattttgtggaggaatgaaggataattcgtcgtactctttcccttgccaatgaatcttcccatcctgataaataactttctgtgttccggaaattttcgttccgacagaagaactaaatttcaccgggaaagagaattcaatctctttcccggaaaggataccgactgttatttgaggttgagtcataatacagctttaatacgttctagtattttttgcagtttttctttggatatagatacttcccgatagatatcatatactttttcaggagtcagtttcttcatatcctcttcacgtactatagggaatatgccgttcatttcagctatagcaggactgatgagaatttgttcgtctccttttgcgtaatagcagtcgggacgatgtttgctgcgtaagaagataatacaattgtaagggtgttcggccactgactcaaattgatcgtcgtagttctttccaaaatgctctttggtgatttccaaaccataccaggcaagaatattcatcattggttcttttccgttattattggcagctaagatgtcgtaaatcagatgaaaggttttcgacattgttttcttatttttcgcctgaatcctgatgaaactgtacgggaaatcttcataactaattcgcaccttgtcgttatctattaaatctatgtgatcgtaatatgatccctgcatactttcctctttactgcaagcttgaaaatgggcatgatcgggagcggaagctccacattccggtccattatacaaaaggaagtattctctcattatgtcggtgaattctatcatatctttaaaacgcccggctatggattgcgacttgtgttccttatctacaattgtaaagtggtgtttaaatatgggatagggattaaccagtatctgataattcctataactgatgaattcttgttcctgcggtcggtttgtttggcagaggaagcaaggccgtgagtgaatggaggcagtatctgtctgtgcggtagtcgaaagaatacgtttcggattaaggaataggttcgcatctaaatattgcttaccaaaccatttggatatttcttttgttcgtgaccgatactgtttcaatgcctggtaattctctttggctagttcccaagaaagagtttgcttttggaataaccgttcgatactttgctgaattttctctaatgtcgtttcttgttgcaggatgcgctgttccaattcccacgtacgaagtcggtctttatatagattattctggttgattttctcaacaggcagtgcagcatccgagttgccttcccaacggcggcaaaggtaaatcacgtcgtatattctgcctatctgataatcgtgtgaaattttcaatccaagggcataatcttctccatagcttgtgttcgggactttgatttcccgaagaatgggcgtgtagaatgcacggggagctcccagaccgttgatacgtaatgcattatttcgtccgttgtcgggtgtccattccttatgatcgatgatgccgggggcaatttcctgcatatcaaagttagtcatcatataagtgccgattaccattgcacatttctgtttatagaaagtatcaatgatgatttgcaggctatgttcgtctttatacacgtcatcgctatcaagttggacggcaaactttccacatttctcgtgatggatacctatgttccaacatccgcctataccgaggtcatttctttcgggaatgacgtgaatcaggcgcttgtccgaactaagttcacggagaacttcactggtcccgtctgtcgaatgattgtcgatgacaatgacattgaacggaaaggtcgtttgctggttcagtgccgagcgtacggcatctttgactgtacgaatacggttgcgtacgggtataatgacagaagcttcatactcaaaagtgtgggaagaaaagtctacaggacggaagataggataaagatatccgccaatttccttcaaatggttggtgcatgcctgttccatttcgatctgtacctgacggtttttagggtctacataatcgaactgcttctcaccgcttttccgcttgtcactttctacttcggtatatagatattcgttgatatgtaccagtttgctcttttgggatattttgagtctcaaatcatacaagcctgcatattgatattcctcttccgtattttctataacttccttgaatgcgttggcattgaacagtaaaaccgagccgaaattgaagtcgtcacgcaggctaccgggttggtaatcaatgaccggagctgttttttgcacaccgtctatctgttggtaatggtctgcatataccatgccagcttgggtcatttccattacttgaaccattctttcaagagcgaacatgcctatttttagtgcagtgtgtttggtatagagcaaggtatatgttttatcagaatgttctgcaatagctcgcattgcttgtgtagactgcattttttctacagagatgagttcgcatccgggaatacagacattggtaattggcgatgccaataaataaattttgtctaccagcgtcgatgcacgtaactccttaactgtttgcacagtttcttccaaccggctgaaaggaagaaaacagttgattgttgttttcattattttactttttgttttgtagtatgagttgtgtaagatgtttctttgtcttgtcttttgatgaacaaacaaagtccaaggaatgtgaacagggcattgattatcaacaactcgtaactaatttggtaaccgttgagccatgcttccgaatttctttgaaggatatagcaaagaataggagaagcgatagctaccaacggaatatatttatcataaacttgtttcttggtgaagatgccaaaagcgaacagtcctaagatagggccatacgtataactggccaatgtgtaaatcgcatcaatcacactcgtgttgttcagcagattgaatacgaaaatgactgctcccatcacaactgccataccgatatgtacatgtttgcgtatttggctaagtgccgcctctccttttttctgtgcatgtaaaatatctacagtaaaggaagtggtcagtgccgtcaaggcagaacccgctgcagaataggcggaggctatcagtccgataatgaataatattccgactatgccgggaaaataatttccggtagcaatcatcggaaacaactcgtcgcttttttccggattcccaatgccttgctgtgctgtaaacgtatataacagtactcctagcatcagaaaaagcagaatgacaaagaactgtgagattccactggtaatcatattcttctgtgagtcccggaagttcttgcagctaagattgcgctgcatcatatcttggtcgagcccgttcatggcaataacggtgaatactcctgccaggaattgcttgaagaaatatcgtttgtcattaacatcgtcaaaaaagaatgtcttggaaaagtcactgtctgaaatcgtactaaccaaaccactgaaattcagatgcaagctggaagcaatataatagatgcaaagtacaaccgacactaccaggcagaatgtttttagaacatccgtccatatcaatgatttcactccaccgcggaaagtgtaaagccatacgataaataccgtaagaattacgttcaacaggaaaggaagatggaaaggttcgaagataagaaactgcaatgtcaggcatacgagaaagagtcggacggctgcccctagcatctttgaaataaaaaagaaccaggctcccgtcttgtaggaagagcttccgaacctgttctccagatattcatatatggaaaccaggttcatacgataaaagagaggaacgagtacaaacgcaatgataatttgtcctactatgaatcccagcaccatttgcaggtaagaaaagctacttgcctgtaccatacccggaacggaaacgaaagtgactccggaaatggtggaaccgatcatggcaaaggcaacgatataccaggctgatttacggtttcctacaaagaatccttcattgtcggctttgcgtcctgctatataagagatagtgaacaggattataaagtatgccacaatagtaatagatataacggctggactcatatctgctgtttaaattcgtttgaggataaatatccggaacttgtttactttgcctacaaatgtagggaatttatcatagatatgcatactcttacatattttttattccgggtgtgcctccggttgcatgttttgatgaatgccaattcttattgagagagggtaactccggggatttcttttcgagtgaaacgccggttattttatcaatggtgtgcatttcatctctaaaacaacaagtgtcaaaagtatgtcctggtgcagtctctttactacttgaaagtgccagatacccgccattattgttcagtgccgggaagttcggtataattattatattttctccaccgactttatgtttctgaacgactctgttgaagtatttcgtgaagcaaagatatgctttggcaggaatggttaggggagtagaaggactttcattttgaaggatggtagtattgtatattgccccgtctttatacatcttatatagataaagtaccggtaaaatgatagcctgttcagtcggattgtagatttctatatattctgcaccatcagtggcattattatacatgatttcattgaaaagaagcatacctctcacatctttcggtaattcgggggtgttcggattatctggaatgtctgttccgggatgatcgggtgtttcatcaggtgtagtgtccgtttctacgttattagatagctgtatgtgatgaaatgtaaatcctttacagcgggttttggtgtaaatgcagtatataccgcagtagcgggaagtttgtatatcggtatcttttatttgtttttcttttacgtattcattctcggattcacgtcgtgtccaaaaagtccagtaaccattattgtcacgttctacttttatatatagtttcggtgaagagtctcctttcatcaactctcttcccgaagccagtagtttagattggtctccgttttgacgataaagagttacattatctttggctcctcctatctgaatataataaccgtttaaattctcggaaagaatgtttgaggaagaagtcagataaaatcgtgcataattgttagcggaaggattaaaggtgaggtgaactccaaattcccaacgggtattttttacagaggtggaaggaatggtgacataagctgttccggcgtcttcgtatggatcattcagatggattccttctttagaattgatggtgaatttgtccatctctccttcccagggaagttcggaggtaactgtatcctcttcctctgaatctcctttttcttcgtcatcagtagggagcgaacaattatagaacaatatgatgaagatacttaggaaagcaaatgctttgtaaactttcatacggtttttaatttgagttttttcgttttaccgtatttgtttgtgtataatgcagaagcaattgcggtctgaatatttgaatgagtcggcaaagataaactttcttgccggaaaaagcccatacttacagaagaaaagattgtaattctttttgtttcctatacacgcatgggaagaaaacagtaagggactaccctaagtcatatttaatagattgacttttgatagtcccttacaactgttacattcaatatgggaatactattcgaaacgtggcattacatatttatcagtataagatgtgaaagtaataccgggcatggaatgagtagacgatgcgttctctaattttttaatcaatgaataatcgtcggcattcaatgcgtaataattatcagaggtcggagtagtcacacgtaccgtccaatcgaacatattaccgataatggttagtgcatccgtttcgggattgaataccgggattcctgtttttacgatttcatacgtccgattctgcaacacatagaaggcgttgttgacatcggtcataaaagcaagcgtctttttgtttctgaactcggtcagatacagatgctttaacgtcagtccttcaggcaaggtgatggcacggacatacggacgccctttcacctgtttcagatgaaacagacggcggtcggcatccaatagaaggtaaccttcgtcatactcctttttcaccgtcggatttcctacaatctccgttgccgggaaacgaaaatctttcttagtcatagcttcggtaaactgaaggcttttatcttccttcacgctgttggtagccatgtcgatgaattcgatccctttggaggtgatgcggaatacatcatccggcatttttaaatccacacgtcctgacatggattccattagcgggtaaagtccgatagaaggcgcattgatatccgaaggaacgctgcggaagttgaagttttccgtctgcaccattttgggagtcactgcgattccttgaatggtatccggaaaacgctcgtcagacatcaactggcggaagtaaaacataggcaggatgctgtcgaaagcagcttccgaataaatgtttcctgccaagtcgcgacgcacgcttccctttccctcttcctgtcccatctgtgcgaaatcgccaatgacgaaactatatagggtaaagggagtcttctccggctttacgacaaagaaattgtaacaccaaggcaactgccaaagaagcaggaaagcgatggttacatataatagtatggtactgaaacgtctcatttctcaatcttttaatttttaatctttaatttttaattgtttagtcctgctttccggccttaaatcgtacgatagaaagccacgagaaagaagctgtcaacaaagtataaaccactaaataagggaggaacttgttgtatgcttccggtgtgggcgacagaaagaagatccgtagtaacaatacagcgataatgagattcagaatacgacgtttccatgccggttcaaggcagatccatgcgacgagcaggtagccggaaatcccggcaagataccacgttaaagcggtgagcaatatgtggttcttcagttcatgggcaagtattccgttcaggtatacttccatcaacaggaaattagaagcaaaacagacaagaatcaatatgagtccggagagtaacatattgcccgtcatttttagttccggataaggcagatggagagtcagtttcaaacatttgcgttgcatctcggggacaaactgcacgattgccatcaggattccggcaatcagggggatatattgcaacatatcaatgaagataacatcgcgttgcagcatgacttcccatacatgagcagcccctttcatttctaccactcggttgatgcgaagcatacaatagcctgtaaaaccgagtgtggcgagcacggcaagcagaaaataccaccgtgtctttatccattctttataaaatatagcgtacatttttgaggatttatgatttatgaattatgatttgtgggttacgagtagccaatttttattcttaatttaatcagtatttgcctgtcaggccgataaatgcatcctccaaatttacctgttcactatgaaaattagtgtaaggtactgacattgatttcagttttgcttctgtctctgccggttgcaggaaggagaaagtctccaactggtttcgcatgacagaaggatgatagaaatcatcagacgcaggaagttcataaccttcgggaatagtgaaagtgtagcgacgtcctttttccagtaattcgacgattggtttctgaatcagtatctttccgtagtccatgataatacagtcatcaacgagtcgttccatatcctgaatgatatgtgaggtcaggaagacggttttcccttccgagcgggcatagtcacggagatagtcgacaaacaagcggcgataaccgggatcgagtccgagtgagaagtcgtccaatactagaagttccgggttttgtgcaaggataagtccgagggcaacttgtgagcgctgtccgcatgacatacgtgagatacgttgtccgggagcgactttcaacttattcatcagttcatagtacgcttcctttttccattgaccggggtagaaagctgcgtagaatttctctatctcggtgatggtcatgaattgatattgcacatgaccttcgatgagcagtccgatattgcgacgcagagccggtgccattgtctgaatctcctgtccgaagatgcgacattcccctgaacggggtttcagataaccgctcaagatattgatagtggtggtcttgcctgtaccgttctttcccaacagtcccaggatgcgtcctttgggtactgtgaaactaagattttcgtaaatcaaccgtttgccgtaatagtgcgtcagattgttacattcgataatatgttccatttgatttaatctgttattctattcaaaagaagaaaaggaaaagaatgggaatcaagattccgacaatgacttcgatccctcctctgccgataatgcccttattccctttcagcatgatgatgccggagagagtaatgataataagagcgatggcgaaaatatccgcgaagtaagtccaccattgtcccgggttgtaatgtaaacgggacattgctccgataagcgggcggcgggtgacggattcatataccacttcccctgtctttacgtttactagaaggttggagccacctttcaggaatactttcattacgtccgttttcgggaagtaatatttggtatagttgccgctttctcccaatggttccaggagagtgagcactttctccttattcattcctgctttatccggtagcttttctgctatcttatactctttccgtgtgatggagaagttcggattaatagtgtcacggtgattcattacaattccggaaatggcatatatcaataccattccggaaaagaaaaatgataagtcacggtgtatgagccgactccacttacggatgttactactccacttcatacgagtcagcttccatgaaatagaaagataaatactcttttcctgtttctgccttgcggtcggctatttttgcacggaaatctgcaatgcgggcttcagggctgttggctgtttcaccacgtgctttcttttcagagtcgcatccggcttcaccggttccgtgtttctcggcagcctgtgctttgagttgcgcttcccagttctggaggtaggcttcgtcaatgcgttgttctttcagtgttccggtaacacgaacgatggagttcacgcatttaggatcgaatgtccccaaagtgcccgcttctacacggatcacttgggtatcgtcgctacccatcaggaagattttctttgcgccatgtttgcaggtatgtgtgcagacgccttcaatggtcacttcttgtcctgcaaggctttcggcattggcaagaagagaatcaatttccaaggcggaagatgcagactgttctgtagtcgcttctgatgcgcttttctgttgtttgttaccacatgaagttccgataaaagtcattgccatgatggcaattgcgattgttagcttttttgttttcattgttattgcttcgtttttatatagtttgtaatctgtttttcgtttgtttatagcttatcgtagttcgccttacgggcgaggggggtagccttacttgaaacttttagtttcccagtttgaaactggtagtttctcaccgagaaactaaaggtttcaaggcatgaaacaaatattagtcttttagttgccggcttgatcccttatgcaacgaacttgcataccggctttaatgctaacataagataatgataatctgccttccggatacttggttgcattgattgtactcattaatccaaagaactgtatattggttagtaggccgctggtactattgtatatgggtttgtaggcggtcgaagtcatgagataattcattgccggttttccatgccacgcagcttgaatcttggcgtcatctgctattgcagttttttggtagctgccgacgcctgtaagacttgttgccatacgaacaccggagaattggtaattgaatcctgcatccatcagtgatgatattttggctccatcataagctgcatcataaaaaagagctttatcaccatcagccggtaccttgccgtcggcatcattcgttgtttttcctaccagattaaagtactccagacgtgtcggtatgtgccatcctttcgggcagattccttgtgctccttcaaaggaggtcagattactatcagtaatttctttaccacccagtgcagcctggaaatcatatagataacctaattcttttatggcactttcttttgttgtagctacggttgcaccgtcggctgtgatttcatacggataccaaacatggctatcagcagttggatcacttgaaggagtataccctttcggtaaataaataagcggttcagccatccatgtcgtaccgtttgagagagttacagtcttatattttacattatcatacaggaaatagttctgatcgagatgttcctcgaaaggaatctcattatcagctccaatttcaccctcatctgtccagttttcaatgtcaccactaagtttgacttctatatcgtcaggtaacacgcgaatgttcacactgtattgtcctccttgtgccaaagtggtagatgtgagcttctgtgacaaggtcttgccgtcagatgttgctacttcaagcgtcaaggctactgtttggggaacgataatggcgcggtatgtctcattcgctttaacggcttgtgcaacaatgcttgttgcggaggcgtttgcatcagcagtcactgtgagagcactcaaatcaagagttgcagtcgggatggaacctttcaatgcgatagacgagatgttagcttctacttcctttgttacattaatcactaatttagtaaacatgtgtttgaagttcatgcttataacgttggtagtcggaagtacatccgatttctttgctgccataaaatctgacgctccatatccactagtctgatcggtttcaacagtaaatgaagccggagtattaccctccttatagggataataggctactatttgcgatttgtcatttccttccgggtaccagagtaaatcgcctgcaaatactccgtcattgtatgtcatctgtttattctctgcatatacgaagtcaccgttttgggtgattgtaacaccgattttatctccggtctcaaagttaacttccgtagcacgtgtaataataggagagatagtaatgcgactgtttgcaggagtcgtagcttcgttctcttcctgttggcaagataccaaaagcgctgctgcgaagataaatgtcaaactctttttcattgcttaataatttagtttatttatattcattgttttcaaaaagtatatcctaatttgatagtctcgttccaacggttcgaaccatctatatattgcaggttgaaaccgtgcgtataactaccctgtacttccgcataaactccatagttgaaatgatagcgcaatccgaggtgaaaagtcgtctgtggggcagttgtatattcatttttcagattgtaataatcagtcagtcgataaggcgggtcacccggttccgtatctgttgccgtagtcctgtttttctcggtaaagtttcctatggcaaaggatgcagccgctttcaggtcgagtttccccagatgaaatacgctggagatataagtccggctacaaagcatcttttccgaagctacataaggatacatctgtgtggtcagtcgtctgaatgttgatatattcgttcccaggcgaagttccgtgcggggactaatccattcatattcgggatggacggagaaaacatcctgctcaaaaatacgattggaaccgtgtacgtgagtgatcgttatcccgtttaccgtttccttggttatcacattttcattgttgaccagatgtgaccattgcaaattcagtcgcagaaaatgctctttctttccctgtttgaaatgataactcaaatgggaggtaatccggtgggttggaaatttaaaccagatagcatctctttcaccggcagaacctgaagaatacgtgtattcagcatctccgtaaaatcctttccattgaagttgcaaggctaccccgttcgacaattctttgatggggaaaccgttgacgcccgattcactaagatggattccactcccgtcccatgcctcgtaagctccatacataagtcctttatccagaaaagtattgtaagagttttcggctgtaccgatgacttctgctttcacagattcactgtttttaccgaaaatataggaaaagccgatcgccatatctcccgaatgatacatgacgctgggggctattttcaaattcagtcggtaattggtatgccgcaagtcctttcgtttggaatagttggaagcggcaaagtctatctttcctcctaatcgccagttgggtgaaatatcagttgcaataccacccatgaaagcgtaagtttgcaagtctttacgtccgggtgtgaactccaggaggtctacgggataaaatcctgggtggataaacatcgaaccgctcatatccttgcctgaagtatgatcgaatgagaacgaacccgtcagtgaataacctttcagatgagtgatggactttgctaccgctccggcactccatgcttcttttgcttcgtaatagttgcggaaatcaccgtggttattctttccgtacagttcggcataggaagcagaaatactgtccatcatgatacctgtgacatttgccccggcattccaggagttacgccgttcgatgatgtcataagtctgtgccgaaactccggatgtcagacatagaatccaaagacctgttatatatattttcttcatctcactcatgcaaagattgtttttcccgttcataaaaatcggtagaagaattgtttgtatctaccagtacttcgtaacccgcttcctgtgtcgcttcttcatccacatgacggtataaactgcgtccgttgtatgtggcactttgagtgacatatcccgcatcgatggatggagaaatacgctttttattgttggaggaaccgccataatatacttccgtgccatcaatcacccagtcgagtggtaccgctatcacctgatccgtagtgcttcccggtttttgtatgacgcttccctcttttagaacgaagtcctgtatcgtggtatccttggctttaaaaataaccgcggcaggagaaaatatcgagaatgaataggcgttcgcctgaccagtcttcaacactacgttcaggtaatgatctggtgtgatctggtcgcccggagccggatgatactgtgtgttcggaaaataaacattattatagcatacaaaatatccgggtttgttcaggttgacagattgcggatattgtgccgcatggtcaaccgctccgttgatggcaatcactgcatcttctcccggctgaagcgggaatgttttaccggtaccgccaaattgccatatacactgaacgatgggagcgaagtccttgaagatggttgctccggttacttcatcctgtgtcacccatacattagtggcttgtgaattgtaagggtcgagtgctccgaagcataaactatccagatattgcacttccgagtcgttattatgcaggataatgtacttgtcggactgataatttccttccagcggtaactttgtgcatcctccgcagtaaatctctttaataatgatcgtcccggccttggaatgaatgagcgggagattaagagacatgtctccgctggttagtttgacattatcagctaatccgttgaaaatatcctttccgcctttgtcgctgacttgtacgcggtatatacctttggtcaaagagaattgcgccactccattcttgtcggttttagccttgtaagaatttccacggtcgacatcttcaatctttacggtcactccttcccggagatgatccgtgtatccgtccggatatacggcagtaacctgcaggctgtgcaactggttgtcatacggattctctttatcgatatctgtgcatcccgcaaagatgccagtcactgttagtaataatatgtagatgaattgtttcatatagttagaatttgatacggcaagtaagtccataatagaaatccggggtgaagagagcgcttacacccgttgcatgagattttacataaggccgtgagttggtgaaattaatcgcattgagagaaagagatacatagtctccaatctctttggtgatattgatattggcagaaaaataaggatcatatccgtctgctgcaaatgtataggcattgcccgatttgcgtatcaggtaggagaattccggattcgcggcttccgctgatgtgaaaggatgcatctcattattcaggtcgaggtatgctaccggccagatagcggtataagagttaccgtcatagatacttcccccggtttgggtattactgctttcgctcacattgaaagcatattcttttccttgatactcggagatgttctgcgaacgcttcacaagcgaagcttccagtcggcacgaaataatcagtctggctttcggaatacgggtgatggctgtgatattggcatccagcgagtgggtacgtttgccgttggcggtagtcgataagttgtcaccgttggcgtagatacctacatattggtaagaacgattggcaagactggtgtgcgaccatccattctgataataatacgataaagagttgtcgatgtatttcgtataagtataagcggcatctacccggaattgcgtgcgaatcggagtaatttccgggaaatcaacaatcatttccgctccgcgatgaatcacgtccattccattgtcgggagaagttgactttacaaaagtctggtcggtcactttgacatccataggagtccagtaactggatgcattgtcgcgtatgtaaaccatccctgtctggttatctacattgatttgcgggttagtcggcatcgtgaatccatccggcaattggagcacatcataggagaacggagtataagtacttgcgtatttatacggcagcttggtacggttgaaataaccgactaatgaaatccgggtacgggcaatgttgacgtccagaccgatttctgcgttctgattccgttgccagcgtaggttttcattgtgcaataacgtgtagggctgactataatatatataagatgattcaatcttattataggaaaagccgaaggtctgtatgtcccgatattcctgtttgggatacaaggtatagaaagagggaagtttttcggtaattccccaaccgccacggatagcgatatgttcgttcaactgccatctggcattgaaacgtggtgaaagagtattcaggttcttatatttcgttcccttgataaacaaatgttcccaacgtacccctgccatcagtctaagcatggtatttcccacaggaaatgacagactttcttctgcataaagcgaaacattatgcatatatggataagtagtgtaaggacggggacgataaccgtttggagccaatgatgggtctttgtaatattctccttcacccacattgcctgttgctttccattgaacacccgctttcaggttgctgtttacagtcttaaatcgtctgttccattcatattttaacgatgcggcataatccagttctttggagtcgatgatttggtcggcaaagtaagtatatggcagtttgtttgccataaaatatccttcctctgtggcatgaacagccggttgctccgatgcataggagtagaacgtatgcgcgtgggagttgttatcattgtagtatattgatgcgtcgaacttaaggttggttatccacgatttgttgagcagccaggccagtgaagtgtttgtccggaatacgttatctctcactttgttgtattctcccgaataggcatcaggatcatctttggtattcattcctccgatattgcctgtaacaccgatgtcgaatcttaatacgttgcggaacgtgttgctatatccggcagagaatcctcttcttgtataagaagaatagggagataccaacttttgagtagccttggtccactcaccgtttatgttgatgacacctttattgtttcctaaatccaatcctttagcaaatgaagcctgttcggtgcgaggattgatagatagcaatatgttccagggtgttttccctttccgggtgtgaatcttgaccataccactattcaagtctccatattctgccgaaggcactccggtgatgacttccaccgattcaatatctgcaacagtgatattccgggtatccactccgttcatattgccaaacgaaccattgtttccaatacgaactccatccacttctacggctgttccaaatgcggcattaccggctgttgaccctccgtcgcgtaatgagaagatattattggtggtaagatccggcactttagtttttcctcccggaaggagagcggagatatcgctcacgttggacacctgtagatgttccaatgcatgatttccgatagtgagcgtcgtgtttaattcatttttgggtgcttgtgcagtgacgactacatcatccagtgcaagtgtattttctttgagtatgataggaaggttattgatattgctgcgtacatttacgggaattgttgccggtacataaccaagaaaagaaacctccagattatattttccctcctgtactccttgtatcgtaaattctcctttctgattggatacggcccacaaataggtacctttaatgaggatagaagcaccaggcaaaggggaattcgtttttgcctcggtcacacgtcccgagattgtatagatgtttgaattagctgcggcctcaaataaattgaaaaatagtagcccccagaatgctatattaaaaagacaatatttcatagataagttttgcgcaaaattcgataaaaagtgactttctatcaatcactataaatagttattttggtagatgctgatacctataactagtgacttcttacctacgaataggtattttctctctaattacggcttggagaataaaaaaccggcttgcattgtgatcactatcacattgcaaaccggctgatttattgggcttatctatagttgtccggatattatatccagtctgttatattagatattttttactttaatcaaatattcggcaatctgaacagcattcagggcagcccctttcttaatctggtcacctacaatccagaaagtcaatccgttttcgtttgtcaggtctttgcggatacggcctacgtataccggatctttacctgccaggaacaacggcatcgggtattctttttcggcaggattgtcctgcagaaccagaccttcaccgttagcgaatgcttcacgagcctcttctacggaaatcggacgttcagtttctacccaaatactttcagagtgagcacgtaatgcaggaacacgtacgcaagttgcgctaacttttacgtcagaatgcatgatcttgcgtgtttcattatacatcttcatctcttctttcgtataaccgttttctgtaaacacgtcgatctgcggaatcaggttgaaagccaactgataggcaaacttctctacagtcacaggttcgtttgccaatacctgacgatattgttcgtacaattcgtccatggcagcggcacccgcaccacttgctgcctgataggtagacacatgcacggtttttatatgagaaagcttttcgatggctttcagtgcaactaccatctggatagtcgtacaattcgggttggcgataacgccgcgcggacgttccaatgcatcctctgcatttacttcaggcaccaccaaaggcacatcggcatccatacggaaagcgctggagttgtcgatcatcacagcaccatacttggtaattgttttctcgaactccttagatgttcctgcaccggcagaagtgaaagcaatgtctacccctttaaagtcatcgttgtgttgtaagagtttcacctcgatctgtttaccgcggaaagtatatgttgttccggcactacgtttagaaccgaacaaaactaactcgtccatcgggaagtttctctcatcgagcacgcgcaggaactcttgtcctacggctccgcttacgccaacaatagctactttcatctttttcttttgttaaattgtgaatattgaatttctctccttatcctgtcgaatagaaaagatttggctgcaaaattataacaatttagcatataaacatcgcttttgagagaaatatttcagtttttcggcggattactcgtgcttccgtatagttggacgtggttattggagtgaaatgaccattagacattcattggattctgcaaacttttttgttcctttgcagaaaattcctaaaaaacacagcctatgaacctgtttgatctcaatttaacgttgccgatttctgatccgacctgggtgttctttttggtactaattatcattctttttgctccgatgattttggggcgtctccatatacctcatattataggcatgattctggcgggtgtcttgattggcgaacacggctttcatgtgctcgaccgcgacagtagttttgaactgtttggtaaagtaggactctattacatcatgttccttgccggtcttgagatggatatggaggactttaagaagaaccggacgaaaagtttcgtgttcggctggctcacctttctgattcctatggcgttagggatatggagtagtatgagtatgctgggatatggttttctcacggcggtattgttggcaagtatgtacgcttctcataccttaattgcttatcctattattagccgttacggattgtctcgtttgcgcagtgtcaatatcaccattggtggtactgctgtcaccgttactcttgctttgattattcttgccgtcataggtggtatgtttaaaggcactgttgatggttggttctgggtatttcttgtggcaaaagtggctttcctcggattcctgattgtattctttttcccccgtatcggacgctggttcttccggaagtatgatgacagcgtgatgcagtttgtgtttgtgctggcgatggttttcctcggaggaggattgatggaatttgtgggaatggaaggaattttaggtgctttcctggcaggattagtgttgaatcgtttgattcctcatgtatctcctttgatgaaccggttggaatttgtgggaaatgcactgtttattccctattttctgattggcgtcggaatgattattgatgtaagaagcctgtttaccggaggtgaagcattgaaagtagctattgtgatgacagtggtggcaacctttagcaaatggctggctgcctggatcacacaaaagatctatcggatgcagtccaatgaacggagcatgatattcggtttgagtaatgcgcaggccgcagctacactggcagcagtgttgatcggtcatgaaatcattatggagaatggagaacggttgctgaatgatgatgtattgaacggtacggtagtgatgatacttttcacttgtgtcatcagttctttggtaaccgaacgttcggcacgtcgttttgctttggatgagaatgtgcaggcggaagaagaagctaaaaaagtaaatacggaacaaatcttgattccggtggctaacccggagacgattgaagatttgattaatctggctttagtaataaaggatgccaagcagaaaaatgcattggtggcattgaacgttatcaatgacaataacagttcggagaagaaagagcagcagggtaaacgtaatctggagaaggcggctatgattgccgctgctgccgatgtgcctgttacgatggtgagtcgctatgacttgaatattgcttcggggattatccatacaatcaaggagtatgaagctacggatattgtgatcggtctgcaccggaaagcaaatattgtcgactctttcttcggacatctggccgaaagtctgttgaaaggtacgcatcgtgaagtgatgattgccaaattcctgatgcctgttaataccctgcgtcgaatcaatattgccgttccgccaaaggccgaatatgagtcgggattctctaaatgggtggaacacttctgccgtatgggaagtatcctgggctgtcgggtgcatttttttgccaatgagcgtacattgatgcgtgttcagcaacttgtgaaaaagcgacatgcaggtactccgacggaattctccatattggaggagtgggaggatctcttgctgttgacagggcaggtgaattatgaccatttattggtagttatctctgcccgtcgcggatctatctcttatgatccctcttttgaacgtctcccggcacaattaggaaaatatttctctaataatagtttgataatcctgtatcccgaccagtttggcgaaccgcaggaaattgtgtcattctccgatcctcgtggacataatgagtctcaacattatgagaaggtcggcaaatggttctataaatggttaaagaaaaactaatggaaagatacgactggcaacagagaacggaactcctgttaggagaggaaaagatggaacgcatccggaacgcgcacgtattggtcgtgggactgggtggagtaggtgcttatgccgccgagatgatttgccgtgcaggtgtcgggcggatgacgattgtagatgccgatacagtgcagcctactaatatgaatcgtcagttgccggccatgcattccacgctggggaggacgaaagcggaagtgttggcagcccgttataaagatataaatccggcgattgagctgactgtccttcctgtttacctgaaggatgaaaatataccggaactgctggatgccgataaatatgattttatagtagatgctattgatacgatcagtccgaaatgctttctgatttatgaagcgatgaaacgtcgtataaagatagtttccagtatgggagcaggggcgaagagtgacattactcaggttcgttttgccgatctttgggagacgtatcattgcggtttgagtaaggctgtgcgaaagcgtttgcagaagatgggaatgaaacggaaacttccggtggtattcagtacggagcaagccgatccgaaagcggtattgctgacggaggatgaacagaataagaaatcgacatgtggaacagttagttatatgccggccgtgtttgggtgttatctggctgaatatgtcattaaacgattataaggctattatgataaaactagaagggattacgaagagtttcggctcattacaggtgttgaaaggcattgatctggaaatcaacaaaggagaaattattagtattgtaggcccgagcggtgcgggtaaaactacgttattgcagataatgggcactttagatgaaccggacgcaggtgtggtacagattgacggaacaatggtgagtcggatgaaggagaaagaactatctgcatttcgtaataagaatattggttttgttttccagtttcaccaactactgccggagttcacggcattggaaaatgtgatgattcccgctctaatcgctggggtatcttcgaaggaggcgcacgaacgcgctatgaagattctggattttatgggactggttgacagggcttctcataaaccgaatgaattgtcgggaggcgagaaacaacgggtggcggtagcgagggctttaatcaacgatccggcagttattctggcagacgaaccatccggtagtctggatacacataataaagaagatttacatcaactgttcttcgatttgagagaccggctggggcagacttttgtcattgtgacgcatgacgaggggcttgccaaaattacggaccggaccgttcatatagtggatggtatgattaaaaaagattaattagagaacctaatttctaaaaatgtataccaaaaaggtagagccttgcaagtgttctatcttttagctatatatttatagtcgcttctctacggaagtctgtgaagatgatagtagagtgtttgttttgtttgtgtgtgatgcattcttgtctggtgtgataggaatgcatcttttttttattaattataacaaatgtagggctctagccgttcaagatcaataggagtgaactcctcatagagagataattgcttcagactttttaagaatcctttctttttccgatattctatgataacctttgcttggtagtagtttatgtatggatgatgcatcattcgttccatgccggctttatttacattgatgcggcgtgtctgatgggtgtcaatggaaaaccacggacggagtttctctgcctttagatgaatctcctgtaactgctctattcggaaaaagcctcccagccgttcgcggtaattcacaatcatccgggcaatgctgcttccgattcccggaatcttcttcagttcggtggtatctgcggagttgagactgatgacagttcccgggagatatttcacaagggtgtcccgttgtatgcttggtgcggttaacaatcgtaccgtgtctttatttgtcgaactgaaatcttctgtaatttgtatataaggacgaagagtctggtattgttcttccgtgagtccatatatctttcggaaatcttccgggtggcggaatttaccttgtttatagcgatagtgcaggatattctttatcatccaggatggtaatccaagcgaaagaaaagtagtggagtctgcggtgttcgggtcaaacatcgcaagcttgatttccctttgaggggatgattgaaaagaatgaccggacttttggtgaggtttggtttcccggagggaggaaataaagtcgttgtattccttatcgaacttctcgttctctctgcagtcggtatcttcagcgtgtgtgaaaaaggagaagagtttaggggcggcatatactcctaaaataagaacgacaaggacgataatgccttgtcgttctgttttagtataataaaggaagtctttccacattatagcttgattaatcccagttcattgataaatatcagtgagatggcgattggtgcgatatattttaatataaagataatgagtttgtataccggtacctttaatgaaccgtcattggtaatctccgaccatacaatcttcttgtccagataccatccggtaaagagggagatgcacaatccgcccagtggtaacatgattttagctgttacaaagtcgaagaggtcgaacatgcccagtccgaaaacggtaaatcctttcatgactcccagtgatagtgaacagaatattccgaggaagacacaaccgccggtgactaaccttgctgcttttccacgggagaggttgaactcctcatgtaaataagcggttactacttcgtgcagggaaatggtagaagttaaagcagccattgccaacaacgcataaaacatgacagagaatatatatgccagtatgggaactccgctaaatgcctgttggaatacattaggcagggtgataaagatcagactcggacctgaatcaggttgtatgcctacggaaaaagctgccgggaagatgataaatccggctagtatcgccacaaaggtatcaatgattcctacgctgaaagctgttttggtcaggttggtttctttactgaaataggaggcgtacgtacaaaggcatcccattcccaaactcaatgagaagaacgcttgtcccatggcactcaaaaatacatttccgtccactttgctaaagtcgggcttgagcaggaattcgatacctgcaccggctcccggcagagtgaccgagcaaacaaccagtatgaggataatgataaacagggtaggcatcatgatcttggaggacttttcgattcctttttctacccctttcacaatgatgaaatgagtaatcaacaagaatgccaccaaccatacaaccggtctccatgggctactggagaattgttgaaaagaggatatgaactctccggaggtttttccggcaaagccattagtagcagcttcaaaaatatattcgagtgtccatcctgctactacagcataataactaagtatcaggaagcctgccaatacccccatgcgtcctacccaacgccaatgtgttccaggtactaatttctgatatgctctagctgtgttagctctcgaacggcgtcctatcaggaactcggcaatcataataggcaatcccagaagaagaatgcagcctaaatagatcaatataaaagcagcgcctccatggtttcctgtttcatagggaaacctccatatattacccaatccgactgcagagccggcagaagcgagtatgactcctaatttactgccgaagtttgctctatcattttttgccataaatcttgttttatcttacaaatcgttataaaatatacgtattagagcgcaaatatagaaaatgatacttatatttgcacgaaaattgtaacattatttagatatgctatcttatattaagaaatatccaatctcgctttttatcattctgacagtgatttatctgtcgttctttaaaccgcctaagacggatttagatgaaattcctaacctcgacaaactggttcatgtttgtatgtatttgggtatgtcggggatgctgtggctggaatttttgcgtgcacatcgcagggacaatgctccgatatggcatgcatgggtaggcgcattcctttgccctgtactttttagtggttgtgtggaattgttgcaggaatattgcactacataccggggtggagactggttggactttgcagctaatactacgggagcgattctggctagtttaatagcctattatgtcgtacgccccagaatgatgaataagcagtgaatgaaaaatagaaacggtgaataatggttgcatccaatattcaccgtttatcatttactgttcactcgtttatttttccgttataaatactctaccgttgagctaagtttgattccgttagagcctttgataagaatagtataccctttgggtttgttagcttgcagatcctttataacttcctgcgcattggcgtacgttttgaaagaatgttcgcttgcggcaaacagttctcctacgagccatactttctcaaaaccactttcttttatgtagtcaacgattttctgatgttcggccgggctttcagcacccagttcgcgcatatctcctaatatgagcatcttgtgggggactgtcatgttccggaagttttgcaaagcagccatcatgctggttggatttgcattatatgcatcgatgataagcgtgttatcttctgtctttttaagttgggagcgattgttctgtggcgtatagcttgccagagcctcatcaatcttcttcgcttccactccgaagaaacgtccgatagtgatggcagccagggcattcgggaaattatattctccgatcaactgtgtgcgaacctgatggcgttcaccgtccttgccggctttccattcgaaagcgagataaggcgaattgtcagtaatctgtccgttgacatagagatcatcttcagttccataagaaatcaggttcaatccctgcgcgatattcatcaaataagcgttatcgtgatgaataaaggtgatggcatctttcttacggaggaaatcatataactctcctttagtcttaatcactccttcgaaagaaccgaatccttccaggtgagctttacctacattggtgataatgccataatccggttcggctatttcacaaagaaacttgatttctcccggatgattggcacccatctcgataacagcaaggtcatgctccggtttcaaacgcaatagggtggtcggtacaccgatgtggttgttgagattacctaaagtataaagcacgttatgggcttggcagagaacactggaaattaattctttggtggtcgttttcccattagtgcccgtaataccgatcacacgcgttccgagttggcggcgatgatagttggcaagttgctgcattgtctgcaagcagttgtctacaagtatatatcgtttatcaccttctacggcatattcggcttcatcaataatggcaaatgcgcatccggagtctagcgctagttttgcaaatgcattaccgttgaatgactcacctttcaaggcgataaacaaagaaccgtccgggcagttccggctatcagtagttactgattggcaatccagaaaaatctggtaaagagcagaaagtttcataacctgatcttttatttaaaacgctgcaaagataggctattctttcggatttgatgggagttcggacagatttttacttaggcatataccaaaggaagagtcagtatcatccggcatccgtccgtataggaagagtcgatccggaggctgcctcctaacttctcggcaatgctccggcatatcggcagtccgagaccggtgccttgtgtgaaagaattcattttgtagaaacgctcaaataccgcctcctgctgatctttcggaataccagttcctgtatcggtgacactgatttcaattttcttttcagcttccagtacggaataagctatgcggatactgccatgagttgtaaatttggcggcattatgtgccaggttgttcaacacctgtgatatgcgttccgaattactgcgtatgagcaggttttcttttgcaggttcgaacagaacttccacatccttttgcctgttgtctttggccacttcagaggcaagttgacagatcgtattcatatctgtttcatcatctgtgggcagttgctcatattgatccagttccgacagagcgagcacgtcagtgaccagtcggagcaagtcgttactgttgctcttgataatattgacaaactcctgtgtttccggactattgctgtagtgatcgcttaacacctgcgagaagcctacaatagagttgagcggtgtacggatttcatgggtcatgctctggatgaacgttgtcttcatccggctgctcgcttccgctatgtctttggctttacgtaattcttccctcgacaccgtaagttcctcattctttgttttgagttctgcttccgaaactttcagtttgcgtttcaggaagttttctctataaaggaataagaatagaatacctaataaaataatcaatgagataatcaatgttgttttattatgcaactccttttcctgtgcctggagcattagttctttcttttcggcattgagtttctcaacgtttagcaaggtggcaaattcgctgctggctacttgctcattggctatttttaaggagtcgtcggtgttgatatacatttgcagatatttgactgccatgttcatattccccatcttctggtagatttctccctgtgtacgatagtgactgctgctaagtatactttcgcttaaacggtgctcttccttttcttgcatctctgcagcttccaatgctttttgatattgcctggtctgctgatagtacaaacattctatattatacagtctctttttgatcgattccagtcttttatcctgttcgaatgcaatctgacattccttcaatattttttcggctgcctgaaagtcaccgaacttgctgtagtagttaacgtactccaacttggcagatatttgctgtgtagaagaattggctgttgaaatggccttttccacagctctcaatgcttctttttgttttttctggctgatgtaatagttggctatctgggcatacgtctgggaaatattatagttttcgatattgtatttttcagttagttcgatttccttcaaccgccattcgaaggccatcgaatcgaatcttttgatagtgtagatttgcgacataatgttgtagcaacgggacaaaccggttttgtcatcctctttctgagcttcttttaacatattttgcacttcataaagtgctatgtttgttctgcttgtttttaagtaataggtaactagcctgttggcccatgcaaaataataatatttaggctgatgagtggctttggcgaattcttttactttgttggtatagtggatgacactatcttcattggttccctgaaaataatagtaatccagtcgggtggctatggctactgcctgcattcgttcatcatgccgttcaccggccattctgaacaatgtgtcggacatgctaagcacaacaggctctaataggtattcttgacaacgttgataatattcatagagagtagagtcaacattgaaagtttcagcctctttttgagctttagcagtagtggtaaagaacaaaatgaggaaaagaaatcctacgtgaaatagggttaatcggctcatggtatgaatttttcggtttcttctatagtttgcaaatatacgtttatttcttctttttagtacgaatacttgctttttttatctacatttgtaggcgatctaaaaggaatgttgtcaatgatgaaacctatatctcctatttatataaatgtaaaagggcggttgctcgatcttgctactccgcaggtgatgggaatattgaatgtaactcccgattctttttattcccgcagccggatgcagaccaaagaggacattgctgcccgggcccgtcagatacttgatgaaggtgcttcgataattgatataggcgcctattcttcacgggcgaatgccgaacatatttctgctgaagaagagatgaacagactgcgtaccggtctggaaatcctgaaccataatcatccggaagctattatctctgttgatactttccgggctgatgtagccgaagaatgtgtgaaagaatatggagttgctatgattaatgacatagctgccggtgaaatggatcaccggatgtttcagacagtagccgacttgggagtgccctatattatgatgcatatgaagggaacaccccaaagtatgcagaaagaaccgtcttatgataacctgattaaagatgttttcctgtatttcgctcgtaaagtgcagcaacttcgcgacttgggagtgaaagatatcattctcgatccgggattcggattcggaaaaacattggagcataattatgaactgatggcgcatctggaagaattccacatattcgaacttcccgttttagtgggagtttcgcggaaatcaatgatttataaattattgggaggaaccccgcaagattcattaaacgggacaaccgtattggacactgttgcgttgatgaaaggagcgcacatcctgcgtgtacatgatgtgcgtgaggcggtggaagctgtccggatcacagagaaattaaaaatagagagtggatatgacaaataagaggagggtgcatgttttttgagtttggcataaaagattttatcgatatcctgctggtagcttttgttttgtactatacctacaaactgatgaaagcttccggctccatcaaggtattcaccggaattttggtttttattctgatctggctggtggtgacacaagtgctggagatgaaactgttgggttctattttcgacacattgatgaatgtgggtgtaatagcgttgattgtgctttttcaagatgagatacgccgttttcttttgactttgggatctcaccggcatgtcagtgcattggcccgtctctttagcggatcgaagaaagaatcgttgaagcacgatgatatcatgcccgtggtaatggcctgtttaagcatggggaaacaaaaagtcggcgcattgattgtcattgagcataatactcctttagatgaagtcgttcgtacaggcgaattgattgatgcggcaatcaatcagcgtttaatcgagaatatctttttcaagaatagcccgttgcacgatggagcgatggttatcagcaaaaaacgtatcaaggcggcgggatgtatccttcctgtttcccatgatttgaatataccgaaagaacttggcttgcggcatcgcgcagcgatgggaatctctcaacagtcggacgcacatgccattattgtttcagaggaaacgggcgctatctccgtagcctatcgcggacaattctacctccgcctgaatgcggaagaactggaaagtctattgacaaaagaaaactgattttattgtaatcacataccggacaaatggtcggaagatgagcatggtaaaatgcctctcatcttccgaccattgttgttttatctgctatttggcgctattttgctttatttccaaccctttttgaatgataattatgcccttctttttaggtgaatcgcctacctttgccgtatactattaaaattctatttttgaataaaccatgaaaaacagattgattgctttactggtactttttacagttattttctttagtactgcacaggcgcaaactactgcacggaagtttgaggcaggcaagaacacattcttgctggatggaaaaccgtttgtggtgaaggctgccgagttgcattacacccgcatcccgcaagcttattgggagcatcgcattgagatgtgcaaggcattaggcatgaatactatttgtatttatattttctggaatatccatgaacaggaagaaggaaagttcgatttttccggtcagaatgatattgcaactttctgccgtgcggcacagaaacacggtatgtatgtcattgtccgtcctggtccgtatgtatgtgcggagtgggagatggggggacttccctggtggctgttgaagaaaaaagatatagccttgcgtacgctcgatccctattatatggaacgggtaggcatctttatgaaagaggtcggtaagcaactggctccgctgcaagtgaataaagggggaaatatcatcatggtacaggtagagaatgaatacggttcttatggaatcgacaaaccttatgtctctgccgtgcgcgacctggttcgtgaatccggtttttccgatgtacctctgtttcaatgtgactggagcagtaacttcaccaataacgcgctcgatgacctgatttggacggtgaactttggaacaggtgccaatatcgaccagcaatttaaaagactcaaagaacttcgtcctgaaactccgttgatgtgtagcgagttctggagcggatggttcgaccactggggacgcaaacatgagacacgtcctgcaaaagatatggtacagggcatcaaggatatgctcgaccggaacatctctttcagtctgtatatgactcacggaggaacgactttcggacattggggaggtgcgaacaacccggcttattccgccatgtgcagctcatacgattatgatgctccgattagcgaacccggatggacgaccgacaagtttttcttgcttcgtgacttgttgaaaaactatcttccggcaggtgagacgttgcccgcagtgcccgcagctctgcctgttattgaaatccccgagtttcacttccataaagtggctccgcttttctcaaatctgccggaggcaaaacaaacggtggatattcaaccgatggaacaattcaaccagggatggggaacgattctgtatcgcaccacattgcccgaaacgactcttgcaggcaccactttgaaaattacggaagtgcacgactgggcgcagatatatgccgacggtaaactgctggcacgcttggaccgtcgtaagggagaatttacaacgaccctgcccgcgctgaaaaaaggcacacaactggatattcttgtggaagcaatgggacgtgttaactttgacaaatccatccacgaccgcaaaggaatcactgaaaaggtggaacttatttcgggtaaccagactaaggaattgaaaaactggactgtatataacttcccggtagattattcctttataaaagataagaaatatagcgatacaaagatattaccgactatgcctgcctattataagagcacctttacactggataaagtaggagatactttcctggatatgagtacatggggaaaaggtatggtctgggtgaacggtcatgcaatggggcgtttctgggaaatcggtccgcagcagactctctttatgccggggtgctggctgaaagaaggagagaatgaaatcctcgttctggatttgaaaggtcctacccgggcttccatcaaaggtttgaagaaaccaattctcgatgtgcttcgtgaaaaagctcccgaaacacaccgcaaggatggagaaaaactgaaactgacgggtgagaaagtggtccatgaaggagctttcactccgggtaacggctggcaggaagtgcgatttgccactctggtgaaaggacgttatttctgtctggaagcactttctccacaagcaaatgataacatcgcagcgatagcagagtttgatgtcctgggagctgatggtaaaccggtatcccgcgaacattggaagattcgttatgccgatagtgaagaaacgcgtagtggcaaccgtacagccgacaagatattcgacttgcaggaatccactttctggatgacagtggacaatgttccttatcctcatcaattggtaattgacttgagcaaagtggaaaatgtgaccggtttccgctatctgcctcgtgccgaaaaagggtatccgggtatgattaaggaatatcgtgtatatgtgaaacctgctgatttcaactactaaacagtgaatgaacaagaataaaacaatggatgaaaaagcattgaaatgatgatgaatatgaagaaaaatataattcttttcgcattcctatttgtgggagtgttgactgggtattgccagcaatctgcttacctgtttgtttacttcaccggcaatcgcatgagtgaagaagccgtccggatggctgttagcctcgatggatataattataaagccttgaatggaaatcagccggtacttgattcccgtgtgattagttcaacaggtggagtacgtgatccccatatcttgcgctgtgaagatgggaagacattttatatggtggtgacagatatggtgtccggcaatggatggagttctaaccgtgccatgatattattgaaatcaaaagaccttgtacactggacttccaatatcgtgaatatccagaaaaaatatcccaatcaggaggatctgaaacgtgtgtgggctccacaaactatttatgatagggaagcaggaaagtacatggtttactggtccatgcaacatggcaatggtcccgatatcatttattatgcttatgccgacaaagattttaccgatatagaaggagaaccgaagccactgtttcttccggaaaacaaaaaatcatgtattgacggcgacattatttacaaagataaactctatcatttgttctacaaaacggaagggaatggaaatggaattaaaaaggccactacctcctctctaacctccggccaatggacagaatcggatgactataaacagcagacgaaggatccggtagaaggttcgggtattttcccgctggttggttccgataagtatattttgatgtatgatgtatatacgaaaggtaaataccagtttaccgaaagttccgatctggaacatttcaaagtgattgaccatgctatcagtatggatttccatccgcgccatggcactgtcataccgattaccccaaaagagttgaaacgcctcttcaaggcctatggcaaacccgaaggtttctgaactaaaatatctcgtgggacaggagaaaaacacctgtccctgatttgttaaaccaattgtttttcaggcgggtaatcttcgcttcccagtgagtattcccatccttttgttttcttttgagttattctgataagatggattcaactagttgtaatccaggaaaacagtatacgatatggggaaaagtgtatattttacccttgtttacttgtttcttatatatttttaagtgtataattaccaattattatatgaaacacgcttgttagaatgatgaaaatcttaactttgcgattgataatcttaatgcaatatataccatgagaaaattattcctctttttagttgtcttgtttttgtcgttccagcagctcactttagctgcaatcaaagaaatgacgagtacacccgattcggtttatctgttttcttttgcaacttccggagacgacggacgcagcggactccgttttgcctggagtacagataaagaaaattggtttgaaattggccggaactacggatatctccggtgcgattatagccgctggggatcacagaagaaaatgctcgatccttatttgaaacaatcgtccgatggcgaatggatttgtacctggaaactgaatgaccatgatggatacggccaagctacttccaaggatttaatcaactggaccagtcagaaatatccccgtactacgccggattttgacggagtgagagtgaaagctattgttgccggagaagagcagaaaggaaatatcaaccgggtagtttggaccttggtggatggattggataaaaattatggctggaatcaatatcggaactcattacatggagaacgtccgatacaggatggagaacgttttgccggtttgaagcctgtaaaagcaacggtcactgtacaaccggaaggcgcaaaagccattagtgatgtattgctgggcgctttttttgaagacatcaattattcggcagacggaggactctatgcagaacttatccaaaaccgcgacttcgagtacgacccttcggacagggaaggagataagaactggaacagcactcattcctgggcactgaaaggagagaaaacgactttcactattgatactaccgaccctattcatatcaataacccacattatgccgtgctgaatgtagaacaaccgggagctgcattagaaaatacaggttttgatggaatcgcactgaacaccggagagaaatatgatttttccatcttcgcccgggttccgcaggctaaatcaaataaattgcaggttcgtctggtagatggaaaaggaaatgtgtgtggagagacttctctaacagtgtcttcccgtcaatggaaaacatataaagcggtaataactgctaaagctactgcggacactcatctcgaaatcatccctcaatctgttggtgaattgaatctggacatgatttccctattcccgcagaatacatttaaaggacgtaagaacgggcttcgcaaagatctggctcaagtgttggctgatattcatccccgtttcatccgtttccccggtggctgtgtggctcatggtgatggcttgaaaaacatttatcaatggaaaaatacagtaggtccgttggaaacaagaaaagcacagcgtaacctttggggataccatcaaagcatgggattgggttattttgaatatttccagttttgcgaagatattggtgcggaaccgcttccagtgctggcggccggtgttccttgccagaactctgcctgtcacggcgacttgagaggaggacaacaaggtggtatcccgatgagcgaaatgggagcttatattcaggatattcttgatctgatagaatgggcaaacggtgacgctaagaagaccaaatggggaaaggtacgtgccgaagccgggcatccgaaacctttcaatctgaaatacatcggtatcggaaatgaagatcttatcactgatatcttcgaagaacgcttcacaatgatcttcaatgccatcaaagaaaaatatcctgaaatgattgttgtcggtacagtgggaccgttcaatgagggtacagactacgtggaaggatggaagctggcggacaaactgggtattccgatggtcgacgaacattattaccagactccgggatggttcctgaacaaccaggatttctacgacaaatacgatcgttcgaaaaagacaaaagtatacttgggcgaatatgcaactcacataccgggacgaaaggcgaatatcgaaacagcactgacagaagctctttatcttgctgccttggaacgtaatggagatgttgtacacatgacttcctatgcccctcttctcgctaaagaaggacatactcagtggaatccggatttgatttacttcaataaccgggaagtgaaacctaccaccggctactatgttcagaaactctacggacagaatgccggaaacgaatatttgccgtcaaagatcactcttgataatagagacgatcaagtgcggaaacgcattgccgcttctattgtccgtgactcggcaagtggcgacgtgattgtgaagctggtcaatttacttcccgtagaggtgaatacgaatgtcgacctttccggaatcggtgctatacagtcttctgcaaaaagaaccgtactgaccggcaaaccgaccgataccccgctacctgttgaagacacaatggaagtagcagaaaagtttgactatcaattacctgcttattcttttacggtgatccgcataaagaaggcaaatgagaaataacagaaaaaagtgaagataataacgacataaataatatgaagaagataataagtaccctgctggctagttgctgtctgacttctctgatagcacaggaagtggtagtgaaagggccggatgaaaaactgcaattggttgtatctgcttctccagccgaaaagccgagttattcgattacctacaatggaaagacaatgttggagaaatctcctttgggtatgaatacgaatatcggtgactttgcaaaagggatgaaactgacaggacacgctgttactccgatcgatactgtctaccatcaggatcgtattaaaacctccaaagtgcattatcaggcaaacgaactgatttgtaattttgagaattcgaaagggcagaaaatagatgtagtctttcgtgtcagcaatcacgatgtagcttttcgctatactcttccgcgtcaggatggaaaaggaagtgtaacggtaactgccgaagaaaccggctttcgctttccgcaacaaacaactactttcttatgtccgcaaagcgatgccatgataggttggaagcgtaccaaacccagttatgaggaagagtataaggcagatgctcccatgagtgaccgttcgcagtacgggcatggctacacgttcccttgtctgttccgtatcggtgacgatggttgggtattagtcagcgaaacaggtgtagacagtcgttattgcggttctcgtttgagcgatgtaagcgaaggtaatctgtatacggttgctttcccgatggcagcagaaaataacggtaacggaacttctgctccggcgtttgcccttcccagtgctactccctggcgtaccataactgttggcgaaaccttgaaaccgattgtggaaacaaccgttatctgggatgtcgtacgtcctctttatgaaacgaagcatgactaccgtttcggacgcggcacatggagctggattctctggcaggatggtagtattaactatgacgatcaggtgcgctatattgattttgcagctgcaatggggtatgagtatgccttgatcgataactggtgggatacgaacatcggccgtgaccgcatgaaatctttgatagaatacgcacgaagcaaaggagttgaactcttcttatggtatagctcttccggctattggaatgatattgagcaggggccggtgaatcacatggacaatgctattatccgcaaacgtgaaatgaaatggttgcaaagtcttggagtgaaaggaatcaaagttgatttctttggtggcgacaagcaggaaacgatgcgcctgtatgaagatattttgagtgatgctgacgaccacggtctgatggtaatcttccacggttgcaccatccctcgcggatgggaacgtatgtacccgaactatgtaggcagcgaggctgtactggcctccgaaaatatggttttcggccagcacttctgtgatgaagaggctttcaatgcctgtctgcatccgtttatccgcaacgcggtgggttgcatggaattcggtggttgtttcctgaacaaacggctgaatcgcaacaatgacggaggaactacccgccgtactactgatatatttcaattagccactaccgtattattccagaatccggtacagaattttgcgcttgctcccaacaacctgaaagatgtttcccctgtttgtgtggactatatgaaaacggttcctaccacgtgggatgaaacacgtttcattgacggatatccgggaaaatatgtagtcttggcacgtcgccacggtgacacctggtatctggctgctgtgaatgccgggaaagaaatcgtaaagttgaaactggatttagatatgtttgccggaaaaaccgtttctctgtataaggatgataaaaaaggagaacctcaacttgtgacgttgaaagtaaaagaaagcggaaaagtgcaactggaaatccttccacagggaggtgttgtattggtgaacaactagatgatatttcttttggatgtgagttcgggataaatacccttatcccgaactcacatttttatttgttatttacttgtggcttggtggcaacagtatttattgtgcaataaataactgctgtgtatgaggaaaataaacgatttttttgttggtcttttagcgtaaagatgttatcttcgtttattgttcaaccttaaaacggaaaaccatgcatacaaaactagtaagtcttttcatagcgttgtttctgtgtttgccattgtttgcacagaaagagtcagtccccagaatagatagtgagggagtttatttaattcccgatgagatgccgaagtttccgggaggcatgcaagccatgatgaaatacttggcaactaacgtaaaataccctgtcgaagcccagaagaaaggagtttccggtcgggtgattatccagttcgtagtgatggaagatggaacaccgggacagggaaaggtagtgagaggagttgatccgctgttggatgaagaggctttgcgcgtggtgaaaacaatgcctaaatggtcacccggaatggcggatggcaaggctgtcaaagtgcgtttcactattcctgtaatgtttagcctgtcgaaaaagcaaaatggcaatactccgaatatgaatattcctgaacttactgtccctagcggtcaggaagtcactaataagagtctggagggagtatggcaaagctgtcttgtgcagcccggtgcacatgattttcggattgcattattaccggtcttaaaagtaatttctgccgataaaacatttataaacatcatgacacgtggcagggatgcgaaatcgaatgccattatattttcccagggagagtatcgtttgccttcagacagcgtgtatgtcgagatattgggaaaatcgtccgatcctgttttcgttccgggaacagagaatgaaattagtgttgaacgtctccacgacaatctgattaagttatcgttctcaatgcccgataaagaaaaacgatgggtggagtattggttccgtgttccgtcgcctgatgtgaagataatggctgattgataatttctctctgtatagatttgccattgttgaaggaagagtacattcgttttagaagacttatttgaaacgatagttcccggaaagtttcgttttgaatcgttgcgggatcttatggaaattcaagaaaatacccttcacctttcacaatgccctattcatcggcattagcgggtgaagggcaggctttcactttcctttcacctttctaccctggttttcacagattgtctagtctgctaaatcttttatctatagttggcagaagaagtgttagcagatagcttccagactattataggaaaacttcttttctataagggataaacttcctttgtataggaaccaaactttctttgcatcataagaaaactataaatgcaagctttgattatataaatgaaacttgcatttatataatcaaagcttttgtttttataaacgcaacttgcaattatagattgcatttaatgaaaaacaagtttacatactggtaataagaagtttaccagtaatcaaaagaaagtttgttattaatgaaaaagaagttagttagtaatgagtgggaaacaggttagatatgtttttagaagtaacaggtggagaagaattatacagggttaagaaaacggagggtgaaaggcggatgaaagagcagccttcacccgctaatgccgatgaatagggcattgtgaagggtgaaggctgtacttgtaaaattgaaaaacaggtgttagagggaaatttaccgattggttactgtttatttccccagtgtgagatggtgggaataaagttgaaactttataattttaagtctactctctttcccctataagaaacagattgatcgaatgtcgtagcatcaccgtcaccacaaccttttcccggttctacaatgataatgttgaatttacgatttttcagcattcctttgtagttaccttgccggtcgttaatcgtcagggtacggtctttatcattccatttcatggcaatggtagtgtatgctcccttttcgtaattgtagttgtcgaactcatcttcgtaaagagtcaattcagcgtcggcgcccggataaatgcgaagtgtcagattatcccatttcttttcggtggaatattgtacagccggtccccagggtaggatagaaccagcacggacatagacaggcatgatgtcgataggcacttcacgctggatggtttgtccgcctttcaggcttttcccggtccagaaatcaatccattgggcacctgcgggtagataaacatctgtctttcctatcttattcatattcttctgatagccgttctgtttgtcgtcctgccatgtataaagcgaatcagttacggggcggacaaggaaattacggccaaacatatactctgtatccatctcgagtactttcttatctttaggaaaatccatcatgagtggtcggatgatgctgcccgctttgttggtaacttcccatgaagtgctgtagagatagggcaaaaggcgatagcgcaggtgagtatatttttcgagtgcgtcatacgcccagtctcctttcttgccgaactggtatatttccacagctaccggactggaattgtgtgaacgcatgatcggctggaatgctccccactgataccagcgcacgtgcaattcatgataagcgatattgtgtacattattgttgtatttccgtgcgaagaatccgcctaggtcggtattccagtatggtatgccgcatagtgagtaatttagtcctgccgccagttgtttcttcatcacttcccaggtggagactacatcgccgctccatgaatgtgacgcataacgttgctgtcctaggaaagacgaacgtgtgagcaggaatacccgcttgtcggaagtggtggcacgttgatgtccgtatacacccttgttggacatcaaaggaaaagcgttgtgcactctgcggaatgaacccagataagtgggggtatcgaaatctttgtccttgatttccagatgatccggctcggtagagtcgagccaccagccatccattccgagatcgaagatattctttttcatttctgcccaatacatatcgcgtgctgtcggattgaacgggtcgtaaggttttactccggctttgggaggccatgtctcgaagtgaagcaatgctttcaggctatccattttctggtacatctctgtccacggaccgaacgaggcccatactgaaatcatgatatgtgcattctgtttatgtacatagtcgatcatttctttcggacttttgatgcgtggcgttccataattagcatttctgtcttctccgttcgggaggaatttcatgtattccggatcacccattttgttgatatagcgtgggttttggaatttcatcgagttccagttttcattgcatccccagtattgccagtcctggatgataccgtccagtggtactttcagttcacggtacttgtctactacttcgcagagttcgtccggacttttatagcgttcgcggcattgccagaatcccagtgtccagagcggatagagcggggcctgaccggtcagctcgcgcactccggctattacaccgtccgcattgccgccgtaaatgaaataataatcagcgcaatcgcctacttccgagtcgaacgacatctcttgcggattgtcgaggaaagtagtaggagaataattatcccaataaagggcatatcccttgacggaatgaatgaatggaatgcagatactcatattttgattgcggagaaacagtttctaattgcgttggttcactttacccgtctgctgctgtcccaaaccgtagattacttcgtctttatccagcaaaaaagcctggcggacattgaaagacggaacacctgcatcattgaaaggagtgaattgtgttccgtaatccttgtccgtcaacagacgttgaccggacgaatcgaaaaaatggataccaccggtctccgggttcacttccacttggataagacggctgcttaatgtcacatttttccccttttcaccgaaagaaacaggagtcgactcgggcgttttgacaatgaccagactttctttattgcaagatttctgactgggcgtcttataaaccctgacaatggtgggtgaataaaactctacgttgacatccatcccctgtgtggcacacttgatgccttgtgaggtacgctgtacattttgtgctgtaccattgcctgctgcaaccattgttgcacatacaagcaagaaaccggcttttctaataagattcattttcatggttttaagtgctttatgatgcagcaaaagtagggcagaggcaagtaaaacagacaacaatcaggttgaaacaaatagtaatcacgttgattttttcactttttcggcatattctgacgggcggcatccatacatttcctgaaaacatttgcttaaataactggaactgctaaaacctgtgtgttccgcaatttccgtaatgcttagcttgccctctgttatcagttgtgctgcccgttgcagacgaatgttgcggataaagaggctgggagactgatcgagcatagtcaccagtttgcggtataatcccgttcgctccatacagaggtcgcggcttagttgctccaccgaatagccattgacgtgcagattctgttccaccagtttgatggcttgtgccagaaatgcagattcttccgtatcctgttgctgatggtcgggagacgtttcttctatgccacaggttagagaattattttgttcgatcaggttgcggatacggagtaatagaatctcttctttatgcttgcgttccatttcctttctgctccaatagatatacaaccggataccggtgaaagcaatcagtaataaaatgactgcatacaggatataagccgtggttgttttccaccacggtgcatggatggttaattttattgctgtcactttgccgttccactgaagaggattgtccgaagccatgactttgaatgtataatctcccggtggtaaatttgtaaacagcttgaagaagacctttccccacggtcgcatttccctgtcttcctgcaaatgtactcatccattgcgggtcgataccttccagttgataacggtagtatgtgcgttcatgattgatataattcaatgccgaaaattcgaaagtcaggaagttttggttatagtccagttcgatttcggttgtataaggagcagctttggacaggatgatgcggttgccatattcttttcctgtattcactttctctccatacaagcgtaaggctgtgaaaaccggcggatcaggaagcatcggatgaatggagtccttgtcgggatggaatatgctaaagccatcaataccacccaaatagagagtgccgtcggaagaactgaatacggcatcttttatgtattcgccgtccaaagcaccgtccaactgattgaaccgggtgaaactgatgttcttattctccggatttatgtggatgcgtgtgacaccgttactggtcgttacccagatgtctcgatatttgtcctcaatgataccctggataaagttattgctcaatccgttttcacgatagaagatacgtggggcagagtcgttttcgctggtaaaaagttccagtccgtcaggagttcctgcccatgtccagccgcgtgtgtcggtatataatgtattgtatactttatttctgaaatgatggttcttgttggggggcaaccgattcaggatttcaggagaatttgtagggatagctgccggcttcaatacatgggatttctgctcattgactgtcagtcgataaattcgggaatgagctttcagatagatatttccatctttatcttcggcgaaagattcaatattgatttcttcttccggggagacgggaaatgcattgcgacctatatgagtcagtttatgcatggacgggtgatgatataataaaccccgattgaaagttccgagccataaccctccttgtcggtcttgaaagacagtgctgatttcggtagagacaatctgtccgtttccggtttccaatagggggatgtatttttgtgttcctgtgtggaggtcaatcatccaaaacccgtgaacgcaactgatataggctttctcaccattaggggtaatgataagggtgttgagagtatagttctgttcgaagagttttttccatgtgcgcttgtggctattgaaatagaataaaccgcctttacgcccgttgcgtagttgatagaagccgtctgcacttttgacgacgagagaagtattttgatattcagcctgttcggatgcaggataagcggctatattgtatacagttttttggtcggctatgtggtaacaggacacttcgcctgtgtcatagaataaatatagggaggtactgtcggcattcaggttctgcaattttccggaatacttgccgggcaaggttatacgggtcttgttgtttaattccagtaattcgttagctatgagtagccagatgtgtcctgaatcgtctacaaaaaggtcttctacgggggcttgtatctctctgttcttaaagtaagcatctaaatcaggaatgtattcctctctgtacaggtcaatgcacatcagtttgtgagtatctttaatccataacagagaatccccactctggtaaatgcggtaatgcccgttatattggtttaatggatatacgtattccgtggtgcggtgaagatagctgaaatgtacaccgtcgtatagatttacattaccgctggtggtgaataccattcttccgtcgggcaactggaggatataacgtatttggttatcactcaatccttgcgacgcattgatggtggtgaacaggaattcaccggcatatatgaacggtgtcatcctgaaacagaaaaataagcagagcagaatccgtatgtttctcaaactattggtagtcatggctatgtttcaagattacaaagataaaaaaagtcggcttatgaagcacgacttttctatctgttaaaggcagttatttatcattcagctgataaaaagtggcattttgacttaattttgggcttttatgaatgatattcagacgaatgtttgtatataaagctttacttttgcgatgaatctgacattataaacatatcattaccatgaaagcaagatttgcattatttttattgtttgctattttatcattaaaactctctgtggtctttgcgcaggaaaacatattcaccgtccggcagccggattatcagaaaagcccttatacgggaatgactcgtcagcactggatacaggcaggcgagtatttattaaaaggtgcatttaactatatacatacattagacgatcaaatgtattttccgaaacagctggataaaacatatccgagaaatacgggagaaattccggtagcaaagctggaaggtctggcacggactctatttgtagctgctcctcttttgaaagataatccagaactggagatgaacgggataaaagtggcagactattatcgttatcaactgataaatatctctaaccctgaaagtaggagctatattccgcatcgtacgggaggtcccagtcagacattgttggaactgggctctttggcaatctcgatgaaagctgcacaggaagtgttatggaatcctctcactaagaaacagaaagattcactggctgctaccatgttgagttatggagagggaccgactattggttccaactggatgtttttcaatgtctttatcttgagttttctgaaagatcagggatatgccgtgaatgaaagctatctggagtcgaacctgcaaaaacttctcgcacgctatcggggcgaaggctggtacaatgacgctccggcttatgactattatagtgcgtgggcttatcagacttacggacctatttgggcggaaatgttcgggaagaaacaataccctcaatatgcaaggcagtttatggaaaatcagcatgacatggttgataattatccatttctgttcagccgtgatggcaggatgaatatgtggggacggagtatctgttatcgttttgccgttactgctcctttgtctttgtatgaatatgacaaaagtggtaatgtgaattatggatggatgagaaggatagcttcttctacgttgttgcaatttttagaacgtccggaatttctggaagatggtgttccgacaatgggtttctacggaccttttgctcctgctgttcagatttatagttgccggggtagtgtttattggtgcggaaaagcttttcttagtttgttgttgccggaaaactctaactattggtcggctacagagaataacggtccttgggagaaagaactgaaaaaaggggaagtgtataataagttccagcagggaactaatctattgataaccaattacccgaattgtggcggatctgaaatgcgttcatggtgtcatgagactgtggcaaaagattggcagaaattccgcagtaccgaaaattataataaactggcttaccatacagagttcccctggatggcagatgggaagaatggggagatttccatgaattatggaacaaggaataaaaaaggggaatgggaagtgttgcggttgtatacgttcaaaagtttcgaaaatggaatttatcgtcgtgacgctgtgctcgaaacggatagcactgtgaagtatcagttggcggatattcctctgccggatggaattctgcgggtagataaggtgactgtttcagaaccggcggagatttgtttgggacattattccctgcctcgtctggattccgatataaaggaaacatgttgcaaggtgggtaaacagaatattccggtactctctaacggaaaatatgaattggcaatgataccattgacaggttgggagaaaacatatacggtatatccggagggagtgcatcctgtaagtgagaaatgtgcattaaatatggtttccgatcagttatccggtgaaaaaatatatgtgacacttcaattatggaagaagaatgagaaaagaggttttacttcaaaagagctgacaccggtgaaatctgtccatgtgtcagaggataagaaacaggtgacggtttgtttatcaaacggtgaaataaaaactatttcgtttgagtaatgaatcccattcaagtaactgatatttaattaagaaacatattgctatcatgaaagagaagattgtttggatttttgtcgttttatatctgtgtagctttcatttgaatgcccaaaatgcagaaaataatcctactggcggcgggtatcaagttgcagctgaaggagcttggtgttggtttgccgatccgagagccttgcattatgaaaacaaggagggaactataaataagacatatatcggttacatcgatattcatggtaatataaaggcgatgcagtatgactttcaaaagaaggaacaggaagaagtattgatccgttcgtattttcagccggacgatcataacaatcccacttttcttgtattgcccgatgaaagaatcatgattttctattcaagacatacggatgaaccttgtttttattacagagtctcccgaataccgggggatattactactttaggtgaagaaaagaggattgaaacaaaaaataatacgacttatccttctccgtttattctgtcggatgatcctgaacatatttatttatgctggcgtggaatcggttggcatccgactattgccaagctttcattaccggacggcaaagatgaggtggatgtagtatggggaccgtatcaaatcgtacaatctaccggcgcccgtccgtatgcgaaatacatgtctaacgggaaagataagatttatttgacttacaccacgggacatccggataatgaacttcccaacttcctttattttaattatatcgatatcaaaacattgcagttgactgatgtcaggggaaccgtactttctactattgccgacggcacatttaaggtgaacaagacaggtgattatgcgaaacaatacccgtctacggtagtggataatccttctgaacgtgactgggtatggcaaatagcttcggacaggaacggaaatccggtgatagcaatggtacatatcagcgataataaagaatctcatgattattactatgcaaaatggaacggacacgagtggaaaaagacttttcttattaatgccggtggacattttcatcagacgccgaatttagaaaagtgttatagtgccggtatggctatcgatccgtcgaatgttaatgaggtatattgctcattaccggtagagggaaaatatggtaaggtgtatgagattgtaagatttatcatgagtgaagatggagaggttatttctaaggaggcagtcacaaaagactcgcaactgaataatgtccgtccttatatgataccggcttcagagggtaccccattgcggctgacttggatgtatggcaactattatgattggattgtcagtttacaacatccacaaggctattctacaggaatagcctgcgacttcaaaggattccccgatagaaaaaagaagaagatgatagcggcatccggcaaagaaatacgatttgatcctgaaaaaccttttgtgctggaacagacgattactcttggcgcagataattatcaaggttgcttgttgcaactcggtgatctggaatattatctaaacggagaaacgatgaaacctgaaatcagatataaagggaaggtatataccagcacaaatgtattgggaacatcggattgttggaaaacacaggctcgtggaaccggtggcaagtggtatactccgcagaaatatggggaggttcgtttgaggatggaatataagaaaggtgttttatgtgtatatataaatgacttgctcgatcagagaattgactttgattgaaagcgagcgaactcttttatggagtgggctaataagtggaatcctcgtttatatcgtattatataataaatgaggactaagttcgaagtacaaattctccataatatcatacatttaatagagaatgattgtttttagcccttttttgacatataagtagacctttatattttatgtatcatctatctttgtagacaagaaatcttatttaatatcatgaatatgaatagacattgtggaataattaagtttatattattaggggtggtttgtatatcattactgcctgtatcagtgcatgcacagaagtatacggagtttatccccggtgaagtttggaaagatacggatggaaatccgatcaatgcccatggtggcggccttctttatcacgatggtacttactattggtatggcgaatacaagaaagggaaaaccattttgcctgactgggctacgtgggagtgttatcgtacggatgtgaccggagtaggttgttactcttctaaagacttgctgaattggaaatttgagggtattgtacttccggcagttaaagacgatccgaatcatgacctgcatccctccaaagtattggaacgtccgaaagtggtttataataagaaaacgggcaaatttgtaatgtgggcccatgtggaaagtgctgattacagtaaggcttgtgccggagtggcagtttccgattctcctgtcggtccgttcgtttatcagggaagttttcgtccgaacaatgcgatgagccgcgatcagactgtttttgtggatgatgatggacgtgcttatcagttttattcttcagaaaataatgaaacgatgtatatcagtcttctgactgatgattatctgaaaccgagcggacgttttacacgcaatttcgtaaaagaatcgagagaggctccggcagtatttaaatataatggtaaatattatatgttgagttccggttgtactggctgggatcctaatatagccgagatcgcagtagccgattctattatgggaacatggaagacaatcggaaatccttgtacgggaccggatgcggataaaacgttttatgcccagagtacttatgtccagcctgttgtcggaaagaagaatgcatatattgccatgttcgaccgttggaagaagaaggatttggaagattcccgttatgtatggctgcctgtgttggtaaaagatgggaaaataactatcccttggcatgaaaaatggaacctttctatctttgacaaataaaaaataaatatgaaacggatactgctactactttgcggaataatgctcgttcccgttattgcctgttcccagcatttggttgaagtgggaaaggggtatagctgtacttcggtcaatacgacggtctttcggaataattcgctggttacacacggtgatgaacaatatatcagttattacgataacgatggctatctggtacttggaaagcggaaactggattcggaacaatggacattacatcgcacccaatatcagggaaatgtgaaggatgctcataatataattagtatgatgatagatggagaaggatacatgcacgtatcttttgaccatcacggacatccattgaattactgccggagcattgctcccggttctttggaactgggggataaaatgcccatgaccggagttgacgaaggaaatgtcacctatccggagttctatcctttatccggaggagatttattgtttgtttaccgctccggttcttcgggtcgtggaaatctggtaatgaaccgttattcgctgaaagaacacaaatggactcgtgtgcaggatatactgatcgacggagaaaataaacggaatgcctattggcagttatatgttgatgagaaagggacgattcatctttcatgggtatggcgcgagacctggcatgtggaaacaaaccatgatatttgttatgcccgttcttttgataatggggtaacttggtataagacgagtggagaacgatatgaactcccgatcaaattgtccaatgcggagtatgcctgtcgtttacctcaaaactgtgagttgattaatcagacgagcatgagtgctgatgcaggaggaaatccgtatatagctacttattggcgggaatccgacagtgatgttcctcaataccgcatcgtctggaatgacgggaagatgtggcatcaacggcagataaccgatcgccagacaccttttaccttgaagggtggaggtacgaaaatgatccctattgcccgtccgcgtattgtggtagaaggtggagaagtcttttatattttccgtgacgaagaacggggaagccgtgtgtcgatggcacatgcgactgatgtgggtacgagtaagtggacgataacggatctgacggatttttcggtggatgcctgggaaccctctcatgatacggaactttggaaaaagcagcggaaactgcatctctttgtacaacacacccgtcagggagacggtgaacgcacagcggaaattgagcctcaaatgatatatgtattggaaacgaatatggatacaaataaataaagatatgaagaaactatatgtaactcttttttctgcactctttctaggcggtgcaatctgtgcaagttgtacggataagaaggatgcttctgctgaagaagtgataaacactattcataaagtgaataattattggcagacgaatcatccggaacacggacgttctttttgggataatgccgcctatcacaccggaaatatggaagcttattttttgactaagcagccggagtatttggaatactcgaaagcctgggcggaacataatgaatggaaaggggcaaaatcagatcataaggaaaactggaagtacagttacggtgaaagtgatgattatgtgcttttcggtgactatcagatttgttttcagacgtatgccgatctctataatatggaaccggatacacagaaaatagcccgtgcccgcgaagtgatggaatatcagatgagtacccccaatcatgattattggtggtgggcagatggcttatatatggtcatgccggtcatgacaaagatgtataacattactaagaatccgctctatttggagaaactgcatgaatacctcgcctatgctgatagtattatgtatgatgaagaggccggactttattaccgggatggaaaatacgtgtatcctaaacacaaaagtgtgaacggcaaaaaggatttttgggcacgtggagacggctgggtattggccggattggcaaaagtcttgaaagaacttcctgaaacagataagtatcgtccggaatatatagatcgtttccgtaccctggctaagtcggttgctgcttgtcaacagccggaaggttactggacacgcagtatgctcgatccattgcatgcaccgggaccggaaaccagtggaacggctttctttacctatggtttacaatggggaatcaataacggtttcctagatgctgcagaatatcagccggtggttgaaaaagcatggaaatatctctcaacagttgctttgcagcctgatggcaagattggttatgtgcaaccgattggtgagaaagcgatacccggtcaggtggtagacgcaaactccacttcgaattttggagtaggtgcgtttctattggcagcctgcgaacgggttcgttatttgaataaataaatacaggcacggattacacgggtttcgcagctcttagaggcatgccttaatataagtcaacagcgtaatccgtgtaagccgtgcctaaaatttaattcagcatcaagctcatatatggctttaacggctgaagtattctattggttaattcgctaatattcatctgtatatgcgtaccgggcagtcgctcggtactatacatgcacttccctttacacaggtaataataaccgttattgacagataattgtttatccgataattccaactgcatttcatcttcgggaaaagctgcggcatagatttgcagcacttctttggcattgatgatacgtgccatgcctagcggatgttgaggctgtttctcttcgggaggcaagatttgaaccatgcacttatatccggtgtgttgccggatagcatacaacaggctatattccacatctttattttcagcgcaaagctcattgataatgatatgtttgtctcctttatatataatggttattcctttgatttcgttttcctgtctggctacaaataaataacctccactaatggcaagatcggtcataataacctgaaagtcttccgatgtgtgctgaatacagcaagcccgttcggaaagcttcttattcaaataggaatagacctcctcctgaaattctgaaacaacactgaccgctatctctttagaagggataaactcgggcaaaacgatctctttagttgaatacttgaataccgaagcatatcccatacgggcataataatcaaacaaccagggttctgccggtattaatgtgctgaagtgtactccattccgtaacatccgggcgaaagactgtgataaaagctctctcataacccctttgcttcggaaatcgggatgcgtacaggctcctgaaatataggaagtctgcactgtttctccgccgaaagtcatcggataaggaagcatctgaagcgcagagattacctcatcgccactttggatggcgacattcacctctgttttatagcgcagtctgaagtacatttcaacgaattcttcactatcgtcaaaacagattttccacaatgcttttacttgctcctttatcatcatatttataatggatttaccattttaccatattcatgggatgctctttgaggcaagccatatatttttccagaatcgttgccggctggtaagacagtttggctttgcgtaagccctcaatacctaaatcctcttcccggttgatatagatatattgttcgggaatccggttggcaaattcataattaatcatggcatacgcaccttcaatactggtatccgctttttctacatgtacgccgaatgtttcatgattgataggcataccgaatgtgaatgcgacgattttaccgttcacatgcaagatacctcccgtcagtccgagtgcctcgaagttgtggagagcataaatcagggcgcgacgttcgttgcctgtcccctcctgttggtcacagttattcactttacaccactctgcttccagatccagacattcctgaatacggtccggggtaatcggtgtgtattcgtaatccggataagtgttgcggaaccggttgatatgatttcttttcgcctggaatttcttccctttcagcgtaaataaatcacttctcaaataaatataatccgcatagtcgcggtcttctgtgaaagtgaactgttccggaaggatagcttcgagatcagcgcgcatattgctgcacactcccagcatacagaaatgctggttctctttgcgggcatcttctatcagttcccacaatactgctttcaaatctcctgtgcctacgggcatcatataagcgagttgttctcccgcccagaacttgaataccagaaagttgtcgaccactgcgaattgagtgtcatataagaacctccagctgcaaagattggagaatgaaagatcgcaattgcggcgatcacttttcatcgtgaatgaggtgattgtgtctttgtctgctaatgtgatatctttaaatggaatcataaaattgctttttgcgtttaactctttatataacggaaaatcaagagattttgtttttacaagacacctaataatcgaaggatcgtaggtgtgagcagtgcagtgaagattccattcagtgtcagtcccagactggcgtatgccccatatttgctgctgatatccattgcggtggaagttccgacagcatgagcggctgtccccatcgaaagcccttgggcgatcggactgcctacatgcatgattttcatggtcttaaaaccacagattgctcctaataaaccaactgccacaacaactgccgccgtcagtgacggaataccgccaatggctttggttacttccatcgcaatcggagtcgtaaccgatttgggagccaaagacaggattacttcttgggaagctcccataaacttcgcaatcagcactactgaaataactccgacaatgcagcctgccagttgagacagaaggataggcaataactgcttttttatcatctccaattgaagatataaaggtacgcctaaagcaacaacagccgggcggagccagaactcgatcagatgtcctcctttattataggtctcgtatgagatatttgtcattttaaggaagatgattaatagggcgatggtcagcaatataggatttaataataccagtcctgttttcttctgaagcaatttggcaaagaagaaaatcccgaaggtgatagccagcaggaagaaattattctctaagaagctcatttgtctttattcgttaagttgattttatctttaaggtgcagtttctccgacagatggaaatccgtcaggtgaagtttgcgcgccagcttaatctgacgtgccagcctgaacttgcggacgatttgatgtacccatcccgtaacgacaagtacaagcgcggtgctgacaatggtcgctgttactatcggccagaactctgccgcaataacatcaaagtacagcataagagccacaccgggcggaacgaaaaagaatcctaagttggcaaccagaaagtcggacaatccctgtacccagtgtagtttaatccaacctaattttaaaaagagggtgagcagcagcataccgatgatgctggaggggagcttgatacccgtaagataaactattaattcacccaaagccaaacagccaaataaaatggcgcactgacgtatcatatactaataacctattgattttgtttgaaaacactgcaaaggtatgaaaaataggagtacagtgttaaatattataatattttagacttgggagagaaaaatagccgaaattgtaatgtggatattgcaaaattgagtacttttgcaccgcaaattacaaattgtaaggacgttttataataatattcaatatatctatgctcaatttaatcaaccaaatcgtggcgcgtgcgaaagcaaatcgccaacgtattgttcttccggaaggaactgaagaacgcacattgaaagctgccaatatgattttgacagacgaagtagccgatctaattttactgggtaaaccggcagaaattaatgaacttgctgcaaaatggggattgggaaacatcggtaaagctactatcattgatcctgaaacttctccgaaacacgaagaatatgcgcagttgttgtgtgaacttcgtaaaaagaaggggatgactatcgaagaagcccgcaagttaacgaatgatcctttattctttggttgtttaatgattaagagcggtgatgctgacggtcagttggctggtgcccgtaacactactggtaatgtattgcgtcctgctttgcagattatcaagactgcgccgggaatcacttgcgtgtctggtgctatgttgcttttgactcatgctcctgaatacggaaagaatggcattttggtcatgggtgacgttgctgtaactccggttccggacgctaatcagctggcacagattgctatttgtactgcgcagactgcgaaagccgttgccggtattgaaaatccgaaagtagctctgttgagcttttcaaccaagggttccgctaaacacgaagtagtggataaagtggtagaagctactaagattgcaaaagagatggctcctactcttgatttggatggtgaaatgcaggctgacgctgctcttgtaccggaagtgggtgctagcaaagcgccgggttctccagtagccggagaagcaaatgtgctgatcgttccaagtttggaagttggtaatatttcttataaattagttcaacgtctgggacatgctgacgctgttggtccgattcttcagggtattgcctgtccggtaaacgacttgtctcgtggttgttctatcgaagatgtatatcgcatgattgctatcacagctaatcaggccattgcagcaaaagcgaataaataagtattagatataaactattaagtataaatcgacaacgacatgaagattctggtattgaactgcggaagttcatctattaaatataaattgttcgatatgaccaccaaagaggtgattgcacaaggtggtatcgaaaaaatcggtctgaaaggatcattcttgaaacttactttgccgaatggtgaaaagaaaatattggagaaagatattcctgaacatacagtaggagtagagtttatcctgaacacgctgattaatcctgaatacggcgctattaaatctttggatgagatcaatgcagtaggtcaccgtatggtacacggaggcgagcgtttcagcgaatctgtattgctgaacaaggaagtgctggaagctttcgctgcttgcaatgacttggctccgcttcacaatcctgctaacttgaaaggggtaaatgcagtttctgctattcttcctaacattccgcaggtaggtgtattcgatacggctttccatcagacaatgccggattatgcttacatgtatgctattcctcacgaactgtatgaaaagtatggtgtacgtcgttatggcttccacggaacttctcatcgttatgtgtcaaaacgtgtatgtgaattcttgggtgtaaatccggtaggacagaaaattatcacttgccacattggtaacggtggttctatcgctgctatcaaagatggtaaatgtatggatactactatgggcttgactccattggaaggcttgatgatgggtactcgtagcggtgatattgatgccggtgcagtaacatttatcatggaaaaagaaggcttgaacacaaccggtgtttccaatctgttgaacaagaagagcggtgtactgggcatttcgggtgtatcaagcgatatgcgtgaactcttggctgcttgtgcggctggcaatgagaaagctatccttgcagagaagatgtactattaccgtattaagaaatatatcggtgcttatgctgctgcattgggcggtgtggatattatcctgtttactggtggtgtaggtgagaaccagatggaatgtcgtcgtgaagtttgtaaggatatggaattcatgggtatcgaacttgataacgaagtaaatgctaaggttcgcggtgaagaagcaatcatttctactcctgcttctaaagtgaaagtagtagtgatcccaacagatgaagaactgttgatcgcatcggatacaatggatatcctgaataagtaataattttattgctgatatacaaaaaaaagatggactcgatttcgagtccatcttttttttgtcttactttgcatatcaaatagttatatcccgtttttgatatgcgttactccgtcataattcccgtttataatcgtcccgatgaagtggatgaattattgcaaagtcttactgtacaacactttaagggttttgaggttgttgttgttgaagatggttcttccattccctgtaaaggagtagtagaccggtatgcagatcggttgaatataaaatatttctctaaacccaattccggtccgggacaaacccgtaattacggagcagaacgtagcgaaggcgaataccttattatattggattctgatgtcatccttcccgaaggctacttcgatgcggtagagaaggagctcaccacttctcctgccgatgcttttggtggccccgaccgtgcacacgattctttcactgatattcagaaggcaattaactattccatgacctctttcttcacgaccggaggtatccgtggcggaaaaaagaagatggacaaattctatccccgtagttttaatatgggagttcgccggggagtgtacgaggctttgggaggtttttcaaagatgcgttttggggaggatattgatttcagtatccgtatctttaagaatgggtacacttgtcgtctttttcctgatgcctgggtatatcataaacgtcggactgacttgaaaaaattcttcaagcaggtgcataactccggcattgcccgtattaatctttataagaaatatccggattctctgaaactggtgcatttgcttccagccgtatttacattgggagtggcgcttctattattaggaacccccttctgcctcttcagtttcacgcctatcattctctatgcattactcgtatgcattgattctactattcagaataaaagtctgtctattggcgtttattccattgccgccgcatttatacagcttatcggctatggtacaggcttttggcgcgcatggtggcagcgttgtatcagagggaaggatgagtttgaggctttccaaaagaatttttataagtaatccattttttatttgcctattaccattcctatttttgtttaaaaggaatgttgtctgacacccgggtgtcagacaagttatactttcatggaaaaaaagtaatggatgcaatcgaagaaatttttataggctatatcttttttcatttagtggagtgcaaatcacatttcttattcttcccttaaaccccagcaatttgtcgcctatctgtttcaatgggaagataagtgtttcctgataccaaatgctgtctttacgcaggcttttctgattgtaaactacaccgattcgtccttccaaacgttcttgtagctctccgtttatgtaaagtgaggtccctttggcatctccctctacacgaacctttgtccatttttccacaggcaaacgataggaatggaagatgaattcatagccgtcgcgcgagaatgcgaatttacccgtattttgccagttcgcggtgaaaacagaatggggacctttgaataagaccgcatcgatattgggctttggatctgcgtagatttcaaattccacactatatggataaccgatttcgggtatagaggtaagaaccgagtcgttaccttgcaggataatttcctggccggaaagcgttaggtcttttctgtcatctatgctggcctgtagatttacgcccggtgcttccggtgttgtcctgcaccacgtttcgaaggtttcaaacggtatgtttcttgtgttttctcctttccaaagtttctcgctcataacctgcatggcaggaaaggtgcgtatatgtacatcctgttggctgattccatttccgacacggtcgttccatacagcaaacatggctcctaataaattagtagactgctctatcatttctccctcttgcatcattcgtggtgaccaactctcatatatccattgatgatccagaaagttatggtagtaattcacggctggtacgatatatagaaatgcatcgcatgtattaatcgctttggctccttcctgcagtgcggtttctaagtctagccagctataattccatgcattgaccgtttttcctttcagatttacgggggtatttcctttcatgtgtttcagacttccccataatcgcggattttttccatatttggtgatatacttcagatagtattcagtgaaatagcggaattgttccgcttctttgaggttgtactcatcagtgccgatatgtacgtccggtccgacaaatatcgggtgatctcccgagagatattcgtcaaacaaagtatcaaggaaatcatatacctcttttttatagaggtcgagatgatccataccatattcttttttgtcggctgccagtatcggattgtaatgagtgaaagcgagtgagtgtgccggaacatcaatttctgggatgatattgattccatatcgtgcggccatttgctggaagttgcggaattcttctttggtgtaggaaccatctttggatgtgagtcccggaaaacggtcgctttccaatctgaaggcggcgtatgttttgttccagtcattatcgaaaaactcaacgaaaccattatcattcagatgtatttgcagttcattcattttatagaacgagagaatttttacgtaatcctgcaaatagtccattgtgaaaaatttcctggctacgtcaatcatcagtccgcggtgagcatactgcggataatccaatgcttttcctttcatgagtccaaaaggctggttatggatcatttgcaacagtgtgcgagttccccagaatactccttttacggtggaggcttcgatggttacatggttgcgtatatccagttcatagctttcttctcccaatgatgaaggcgattttttcactgacagatagatagaatgatttttcggttttccggaggttacctgataattccagccgaacatatcttttaagtcttttgccattatttccgcagtttctttcaacaggctttctgcttccggagcgattataatctttcctgtttccggtagtgtcagtttgccttttgccccattccaatgttgtaaggagggaatcacctgcgggatatccgtttgagcgtatactgtcattcctaatagtagtaagatggataagatgcttattctctttttcatatttattagatgtttatatattaatcttgatagcgcaaaactacgatatttggaagtaaagggattctaaaaatagacttatagcttccaaaattcattttttcagttatataggagtatctttgtgacttaatttgattaataatggaaagtaaacacaaactatccatcaaccagtgggcactggaagaccgcccacgggaaaaaatgatggagaagggagcagccgcattgagtgatgccgaactactcgctatattgattggctccggaaatacggaagaaagtgctgtcgaattgatgagacgcctgctcctgtcttgtgataacaatctgaattcattggcaaaatgggaagtgtgtgactattcctctttcaaaggtatgggacccgcaaagagcattacagtgatggcagccttggaattaggcaaacgaagaaagctgcaagaaaccaaagagagacttcgaatcacttgctcaaaagatatctatgatattttccaaccgatcatgtgtgacttggaacaggaagaattctgggtgctcctattgaaccaggcaaccaaactaattgataaggtacgtataagtactggtggcatagacggaacttataccgatgtgcgcaccattctccgggaagcattgctgcaaagagctacacaaatcgcggtggtgcataaccatccttcgggaaatattcatcccagccaaccggacaggagtttgacagagcatatccataaagcggcggaaacgatgaatatccgtctgatagatcacgtcatcgtttgtgaagacggatttttcagctttgcagatgagggcctactctaattagtaatactaccttatttaagtgagaatatcttatttattctcactcctgcattcatttcaagcctgtgtactgtttgaatgcagtactgaaataacgtaaagtagtgaaacctatctgatctgatatttcagtaaatgtcagatcggtggtttttatcagagtaatggcttgctccaacctgaatttgttgatatagtcatttgcccccatatcggtgatagccttcaacttgttgtaaagagatgttttactcattccgatctctctgcagataaaaggaatatctaaagacggattgctgatattctcggaaatgagcttgttaaactttaacaagaacgtttcatccgcctggctgaaagtactctccagcggttgagggaagttgcctatatgttgatagtgctctttcgtttgctcccggttgtatagccggttctgtataatcttaacaagagtgtctatctcaaaaggttttcccagataagcgtccgccccgattttatacccatacagtcggctctgttcatcattgcgtgccgtgagcagaatcacaggaatatgactgatgccgatattctcttttaccgctttgcacagttcgtatccattcataaccggcatcatcacatcgctcactataatatccggaacttgcttttgcgctatttcgaaagcttcccggccatcatgtgctatataaattgctttgaataaggatttcaattctttggagaggaaatctgtcaggttatgattgtcgtctaccaatagcactgtgtaattctgcgtagagaagtcgagtgtctcgggagcgttgatctcatgatctacgtccggtgtaatcaattcattgatgtaaggtttcggctggcagatgacttcgcccgactccaatcccaaaggtaagtcgaagaagaaagtggctcctcccgcttcgttgttcatggctccgattttacctttatgcaattccaccagcatcttggcgtatgaaagtccgactccgctaccgccaatttcctgcttgccttgatagaaacggatgaatactttctccatgtcttcctcttgcataccttctccctgatccaaaacggaaacacggacgtatgagtcatttttgctggtacggatagtgacggttgtgtttttaggactgtgtttcagtgcgttcgtcaataagtttgtgactacgattgtacacatacccttgtcaaataccacctcttttatgctgtcgtcgagctgataatctatttgcacttcctgggcagctccctcgtccgtaaaatcggcaccaatctcctttatccatgagttaaatggataggcttggagtttcaacttggtttctcctacttccatcttacgtacgtccagcaccatgttgataagatctttcatccgttgagcctgtttatgtatattcttcaacggtggataaatggcatctgtagaaggaagtgtctttaatatgcggcttagcggggcatatatgagtgtgagcggagttcgcagttcatggctgatattaatcagaaaacgaactttttcttcatacacattctgctcgtgttctttcatcatccatttcatcttgttttctttgcgtcgaagcagaacgaaaacaatttgtaccacaatgcctatgcaagcaatgatgcagagagaaacgaaccaccagcttctgtaccagggtggcagtacgtttaatgtgaaaagaaactggggagttgtttcatttccttcctgtgtgttacagctcaccatgatgggataacttcccggagcaagagatgggatcatcaattcagggttgtagccttcggttttaaggtctcccatttggaaatgatagactttgagccggagaatgtccgcaccataagtcatgacacggatcttaatgtttttactgttccaggggatggatatcttgtcttgattgagctgatacatcctgttctctccgtttatagtcagttcggcaaggcgtatttccggagagtcactactcttttctatttgagtgtctgcattgatacatagtaagccttttacacctcccatatagatgttgcctttgggggaaatgagacggggctcggccaagtattcattgggggaaattccatccgcttctccgaaccatacaaaacgtttggtatcggtgagccatataaagagtttctgttcagctcctatccacacttttcctttattgtcgcataacacggtatttacttcattaaataaggtggtaggaattctttcgaatttgcgggtatcagggtgataggtgtacaggccacgggtgcctgcaatccagaatacgcccttgtcatccctggatacagcattgaagaatccctgtggagcacttgcaaatatctccactgtgtcttttttacgatccagtctatatatattataaggatcgttcaggtaaatggcagtggaatcatatccaatggaactcaacaagccttttattttcacttctttggcacaagggacaggagtgagttgccgggtggaagtatggtagcggtaaggaggcgaacttaatattaagatcgaattgggagtatcccggtataagttgattggctgtccgctatagcggatgtgatgctctaatgaagggctcataatagcgaaaggacgcttctttcctgtctttttatcgaatatgaagatacctttggaaaaggcagatactaacaattcgttgggtgtgaagctggtgatggagaccatcttgtctccccaagtgtcgggatagtgcacaaatgtttctgtagaaggaatgaatttattgatacctcctccgtccgtagcgatccagagttcttcggaagccggttcctgatatagttgtaataccgtactttgacttaatcctttgttgtgccctaacacaacattagtgtaagttctcatggatacttcacgaatgttgataaccccttcacgtttacttcccgcccatatatttccggcagagtcgctatgcaggcagagtattgtatttgtgggaagggaatgattatctccggagatatgttcgagtacggtaatattgccggttgtgggatcgaggatattgatacctcccccgtctgttcccatccatattttttgtttgaattcggtcatgcacaatacgatgtcactgctcaaacgggagttttgagtggtatagctggctatcaattttccctgggcggagaaacacttgacgccattgttgtaggttgacagccatattctttgttgggagtctatgatgattcctacgttgtcgttcccgtattggaaaggaaatggggttatctcgaaattcttgaggttcatttgcagtattccctgttgccagcttagacacaatatggtatcgggtttccacatttgtatggatcgtataatgaacggctcgtcggtcttgaattcccgtatgagagaaatcgtgttggtggcataagaatatttatatatcttgttgatccctccgaacagaagcccgtctgctattttgcagatcgatttggcaatgatgggctgattatttagtttggggataaagaagttgtcgtgaataagagaataacgggcgattcctgtggtggtcagtatccaggttgtctgctgattatcttcaataatttgcaggatactgtcgttaggcagggaattttcattatcaggttgtgcggtgtactttttgagttccgttccatcaaatctgattagtcctgtcggagtaccgatccagatgaatcccttttgttcggtatagatacagctgatgatagacggcattccgttttgggaaccaatcagtttaaagtcgtaatggttacctatacttattgctggaaatgtgcctacgataagaaaagccagtaagcagaaaaagtgttttatccaaatactttttttcatcagtcaagattattaaggggagattagtgaaacaaaagtatgattaattccgctaaaacaaaagaaatatttccaaaaaccgccacaaagacgttcaaaaacggaatatggatgtttttggaaacattttggcgattttatgaactcgccattctgccaatcaatctatttttgtggtgtatttcaatgccggatagtgtgggctattggcaaatggaactcaaaaaaacttttagtattaactttaatataatgttatgaagaaaatgcagattaggatgcaactggtgtgtctcttttcaatgcttttactgttcttccctgtggagctctttgctcaacagggcactatcactggtaaggtggtagacgaacgtggcgagtccgtaatcggagcaaccgttatggtgaaaggttctactgatggtaccattaccgatttggatggaaactttaaaattaacggtaaagtaggtacaacgataactgtcaactatgtgggctatgctcctttggaagtgaaaatcactaagctaacaggaaatcggttcgtgatgaaggaagactccaaaactttagatgaagtggtggtagtcggtatgggaacacagaaacgtaatactattacagcggctgtagcaacagttaatgcggatgcaatcgctacccgtcctgtgacggatgtaaccagcgccttacaaggtaatgtggctggtttgaactttgcttcggatgcttctgaaagcggtaccggtggtgaagttggcggagaaatcaaatttaatattcgcggtatcggttctattaatggtggagagccttatgtattggtggatggtgtggaacagagcttgcagaatgtaaatcctgccgatatagaaagtatcagtgtattgaaagatgcttctgcagcagccgtgtatggtgctcgtgctgcgtatggtgtggtgttagtaacgaccaagagcggtaaacaggataaagcccgggtgacttatcgcggttctgtgggtatgagtgcacctatcaacatgcccgagatgatgaactctgtagagtttgccaattataaaaatgcgtaccgttcggcaattggtgagtctccatacttctcacaggagactattgatttgatgaatcagtttttgcagaacccctatggtgaaggtctgcccggtattaccgccaatcaggagaataccggttggcgtggcggtgaatcgcagtatgccaataccgactggtttgattatttctataaaaacaaatctttgcgtcattcacacaatctaagtatctccggtggatcggacaaagtgacttattatgtcggtctgggttatacttaccagggtggtttgctggatcgtgtagaagactctctggataaatacaacgtgaataccaaatttcagatcaagccgaatgactggttgaagtttaacttcaataacaatatcacgttgaatctgatttcccgcccgctccccgatatgtctattctttatcatcagatagctcgttcgcagcctaatatggtgactgaagttcctatttccgggctttataatcttccttcatggaatgaagctttgtatctggacaatgtgggctattcgcagaaccgcatttctgatgccatgacttttgcagctactgttacgcctctgaaaggctgggacattatcggagagatgaaagttcgttttgatgtgcagaatgatgaattcttgcagaagcagccccgtaccacacggcccgacggaaccatagagaatgttaccgctccccggcagggatattcttatcccggtatcgaatattcgaattctttgtggggatcaatgactcgtggaaatcaattcaactattatttgtctcccagtgtgtcgtcttcatatacgaatcaatggggtgaccatttctttaaggcaatggccggtttccagatggaagtgcagcaaaactcaagcatgtatgcgtataaagacggagtgatgagcgatgatacattctcttttgacaatgcaaacggaaaagcctataatagtgaagcgcgtgaccattgggcaaccatgggattctatacccgtttgaactggaactaccagaatgtctattttctggaatttagcggacgttatgatggttcgtcacgtttcgcttccggcaatcgttggggatttttcccttctttctctgccggttatgacattgcccgtaccgactacttcaagcaatggagcttgcctgtttcacagttgaaagtgcgtttgtcttacggacgtttaggcaatcagaatgaagccggactatatgattatctgaacttcatgacattgagaccggactattcaaatgcatggttgctttccggtgtcacttcggctactccggtacgtggtacagtcgctttaacaccttctatggtaagcccgtacattacatgggaaaaagtggataatgccaacttaggtttcgacctgactttgcttaacaatcgtttgacgattacggcggatatttaccaacgtacgaccaaagacatgattggcccggctgaagcaattcctgatattggcggtattgctgttgaccaacgtgctaaagtaaataatgcaacactacgtaaccgtggatgggaattgtcggttaactggtctgaccagctgaagaatggtttcagttatggaatcggtttcaatatctttgactacaaagcagtggtaaccaaatacaataatccggaaggattgatttataacaaccacaccggtctggttcgtaacaaaggttattaccagggaatggatttaggtgaaatctggggatatgaagcaaatgatctgtttctcaccaaccaggaagtggatgaatatctgagagaagtagacatgtctttcttcaaaccgaataaggattggcaacgtggtgatttgaaatatatcgattcgaacggtgatggtaaaattgatccgggttcgggtacattgaaagatcacggtgatttgaaaattatcggtaatacgactcctcgttactccttcggtctgaacttacatgccggttataaaggttttgaagtttccgcattgttccagggagtcatgaaacgtgatttcccgatggctgcaagtacttatctgtttagcggtgattccaacttctttaaagaacatttggattattataatgtgtacaacccgggggcttacctgccgcgtctgacaaaacccgacagtcctgaatataatgcgaacgtaggttacaacacttcacgttatttattgaacgcagcttatatgcgactcaaaaacttgatgatttcttataacttccagcctaaactggttaagaagatgggattggagaacttgaaagtgtatttcacttgtgataatctcttcacgattgacaatttgccggacgtattcgatcctgaaaccttgaatcaggtaaatacatgggctgggggtagtaacgaaactgctccgggattgacttccccaatgaagcaaaatggtaacggaaaggtatatccgttgaataaaaactacgtatttggtattgaatttaccttttaaaccataagatatgaaaagaatatatataatggcttttgtagccgcttcaatattaccattttcatcctgttcagattttctggatagagaaccgataaccaagccggaagccggtaattttctgacaggtgccatacaggttgaaaactatattaacggactatatatgacgttgccgtcttttagtaagttcggtttgggagttcgcagtgaagaaaagaatagtgacaatattattgcagaaaagtatgatgcccgtttgcatggacagaataaccagtttagcggagcttccgattggcagactggttatcagaacctgcgtaaagtgaactattttttccataattataaagtacccgaagcacaggaaaacgaagatgtactgtcgttgaaaggggaggcttactttttacgtgcctattggcatttcgatttattgaagaaattcggttctattccggtaatggatgctttttgggatgagaatgcgacaatcgcaggattacagattcccgcaaagacacgtaatgaggtagcccgatttattttgagtgatttggttgaggcgaagaatctgttgcattcgcgcggtaaatattccggaattcgtatcaataaagaagctgccatggttttggcaatgaatgtggcgttgtatgaaggaacttgggaaaagtatcacagcagcgatgattttgcatcttccactaacgaatcaaattatttcttgggtgaagttattaactggggaaatgaactgttcggttgtggcattgatctgtataaaaccgggcaaaatccgggagatgcttttgcggcattgttcaatagcaaagatttgtcaggaatgggcgaagtgctattgtggaggaaatattcgagtgatgaaggagtctttcatgatgtcaacggtaatctgaaggcaggtgttgtcgactcggaaggagctgccggaattactcaaagcctggtggataattatctgaatgccgatggaacatttattgatccgacaaatgagaaatttaaggattttaaggaaacatttgaaggccgtgaccctagattgattcaaacggtgatgaatgaaggtgccaaatttgcttctgccactactgcgaccccaatgcatctggaagaatatacggatgagaagaagaatactattagtcctcctaaattggcaggagatggaaacacacgttctttgacgggttatcacatccgtttgggaatagataccacctttgtaagtggtaatggtgagactgctttacctattattcgttatgccgaaggtcttttggcttatgcagaagctgctgctgaactggaaatgtggagcgatgatatagcgaataagacattgaaagcgcttcgtgaacgtgcaggagtgaaatatctggcaccggcaaaggatgctaatttcaccgatttcggttatacattgactcctgttttacaggaaatccgtcgtgaacgccgttctgaacttgctttgcaaggtttccggctggatgatctcatgcgttggaaagccgataaactgattgtcggaaagtgtggtaaaggtgcttatgtaggtgatgaatctattttattcaaatcttacagtccggataatcagaaaagaatcagagagcgtctgacccttgatgataacaaatgggcggatccgatggccgggactctgccaagcggatatcaattccatgcagatagggattatctgttaccgatccctccttcagaattggaattgaacaaaaagttgagacaaaacccgaaatggtaatcattaataatgatataataggatagattatgaagaaatatttctatagattattaccaatttgcctgtttatccttgtaatgacaggctgtaatgacaccgagacggttatctctatcggagaagcccggaatctggtggccgaaatcagtactcaaagtgctgctatcggagataatgtgacctttactgtgaaggtagatcagcaagacaatcagttggcactcgaagaagatatagacgttgttctgacttttgcaggtaagaatgtaggaggaaaggatgtccctgtatctgatgtctttgaaggctttgctggtcatctttttatgaagaaaggtgagaaacagggatttaccgaatttaaggtaaagaacgatctggctaaatatcctatatcgggtactatcaccgcttatgtcagaggatacaagatcaatgcggctgaacgtccgattgtggtatctgataaacactacaccatcttgtcattgaagaacaattcggacaatacggtgaaagagtatggctcatttattctggtcgctacggtaggagcgtcagctaaggaagatgtagtcgttcatattgatgcgggtgaagatgcggataaatatgagaatctgccgagcgaattggtggtgaaagccgggtataaaacagctgaatctgaacttatatgggtgaaaggagagaaaggaccgaatactttcacttctgtgtctatgtcttttgctaccgattctgaaattcatccggtatatggggacgagttggaaattaaggttactgatacggatgcaggtttgactccgggcaccgagttaaccaatgagcaatgggtttatacagatccggatcagatatttgtatcagccagcaataaaaaggctgtagaaaaatgggatgaggtcagagctgcgtcagcactattgataaaggagggtgatccgcatccgaatgaagcgttagctgctgaaggatggacattcctgaattcttatgagttccatccgattgatgctttgacagaaggtaccggactccccaatcagtatggtaatcgtcctccacgttttatggcggcacagaatgtggctaacacacagaaagtacaagcggttgtaaatgagaaatatgcaacgatgactcaagatggatatttgaaaatgtggtgtgcgtatgatccgggaatcagtgtgacaggggaaattacgggaacaagagattttggagtttcctccctctatgcaagtaagtttgatggtgtgcctacgggtgctgattcttgggaatccagcaatgtacgcattttgccgggcactcgtgtggaagttagaatccgtgtgcgtggaaagaaacactctttcaactcggcagtctggttccaaggaaatatcagaggtgtgcaatggtctacctatggtgaggttgatcttctggaaaatccggctaccaatgcgaatccgaatggcgcttggcagactttccactggaatgatatatccacttcatccggtgataagtataaaccgtcttcaggacagttgataatatcggatatggatgaattcgatatctattggatggaatggagagataataacgagattgctttaggtattaatggtaaagagaatgtacgcatgaggactgacggcagctataccggaatagctaatggaacggcttcatggaactcgtctacacattggccgtttacggacaaatacaatacggaagggttacatttactattgacatttgccggatgtaatgaatgggcgcttggtgacgctgcggtagaacaggctgctaaagatggtagttgggcaaacgactttaagcatatttcttatcaggaaagtaagtctagcaatgatacgccacgtatggaaatcgactggatacgtttctataagaagccaacctacgactattttggaagtggtactccaacgcgtaacaaaccaatgtattaatggttgttgaaataaagatatttaatcgaacaaacttttatatagttatgaaaaaggtttatcacttattgagcgttgcactgctgggcgcaatggcactaacctcttgcgaagaggacaagatagtgaatgaaaataacggtgaagggaacgaaaccgacaagaatctgactgattattcatttatagcttctattaaacagtccgcccctttgggtcgcagcaatttgcagaatggagtgtatacatggaataaaggagatgctgttacattatggaatcgcaacttcggagccggctatgatttctctatcaccccggggtataatgacaaccaacctgacaaatctgctgaattcacaggaaaagctgctgtagaaaatggccataagctgattgcggtatttccacggaaagaagcaaaaacatttaatgacctggctaccttttctatgccggagacatttactcagactggaaaaacagcagaactggcagccactacctatatggttgccaccggggatgtgactgataataagattcctgcattaacgttttcaccattgactgcattgatacagtttggtttgaaaaacacgtcggaccgggaactgaagattcgctatattacgctggagagtgatgatgatgtatttcccgcagagttgaagatcgacgaagacggagtggtacagagtctttcaggtatgcgtaacaaactgacacttgacatgagtggacaagcattggcgcagaatgaaacattaaacgggtatttgaatatattacctacaacctatggtgatacccggttgatgaaaagtacgaccgaactgaatattacagtaagcgttttgaataatgaagtggaacaggatattatcctgctgaaaaaagtaaaagtcaaagatttggaggataacatcggacttgatatggatgctactgccaatcagtttgcagccggcaagcattataaaatggattttgaggtagattatcgtttcagaattcctgatgagggctatatgatcgatgatgatggaaatattcatatctataataagactggattattcggatggaataaaattgcggatgaataccgtaaggcaactgttactttagaaaaagaatatatcgatgaaccggcaggggatggaataaaagtgattgatatgggtaatgaactttgggaacctattagtgcgtttggaggtgtatttgaaggtaatggtgttaccatccgcaatttgcaaatagctaataaaggttttatagctaccaatacgggaactatccggaatttgactttggaaaatgtaagtttctctgctgatatcacagagggagcaggagcattggctgccgaaagttcaacgagtgtcattcagaattgtacagtcaagggagtgactgtaaccgttataaaaccggtagtttttggtggtttgatcggtcgaaactccgaaggaagaatagaaggttgtcaagttatcagtggaactattaaccttaatttgagtggtgctggtaattctaattatggtggcttggttggtgagcattttaatggaacggctcttattataaattcgtatgtcggtgcagatgtaacaatcaagcatcctagtaactctagtggtgcatcctgtgtcggcggacttgttggctggaacaactccggtaaagtcaaaggttgttactcattagccaaacttgaggtttcttgttccggacaagtaggaggacttataggggctaatagtaacggtacggttctggcctgttatgtagccggttcaattagtggaactatctataataatactggcggtttcattgcacagaataccattaataatgctgatgctactgtgacggcttgctactcgaccacgcagataaatgtgactaataatgctggaagtaataaattgggagctttcgtcgcttcgaattcaacaggaatcaaccagtgttatttcgtaggcgagacggtgactaatcctgtaggaagcggatctgtaaatggaattagtaaggtaacagctactcaactcaaggataagaaacgtcagatgaatctggcaatagaagccaaggatccagaatttggttttagctttaaagtgaatgaggatgccggaactaatatatactgtccgttgattctacagggggctgtgaaagaacctggcttcggtggatcagattttggagatggtggtgatatttaaataactgataacagaaaaaaataaatcatgaataaaatctattctttattagggatcgggctgctaagtgcagccaccctaagctcttgtaaagaagatgttttcattgaaggtggggatgaactgcaacggggagaatcacagacttatgtggctgttgcttctatccgggggtatgaaaatacggacaaagaatcgtctacacgtgccaacgtacaagatgacggtagttcctttatgtggaatgccgatgataaggttacactttggaatggaacaaatggctatgatttcacaaccataaattatgatgagagtgaaccgtctggaaatgtggaatttgcagggaatggtaactttgaagagggagctactgtttggggaatctatccgaaaaaagatgttccgacttcagggaatgttttcacttttacgttgggagatgctacgcaaagtgcccaaaaagcagagctgcagaatacgatgcacatgcttgctaaaggcacggtgaatgggactaccgtcaccaatcttaagtttgaacatttgacagctctttatcagtttaaattcaccaatcgaagaccggatgcctataaagtgacaaaggtggttgtttcggctgatgctgctattttcccaaaaacgttgacagtttcgggagaagagaaaacgtatggtgataaaagtaatagtctgactttgtctatgacaagtttggaaatggcaaagaatgaagttgcatacggttatttgagtttcttcccgatggcagacatgacaaaggatacagaattaacctttactgctacgatagaaaaagtgggagattcttcctctacggaaacaatagagaaaaaaggaaagatcagtgaactttataatgccgaatcggtggtagcaggagatgaatataaatatgtggctggaaagcgatatggtatatcatttatgctggtggcagacttgggatatgaggagactgaagcgggtaagtatttagtcaagaaagaagatgggttgataaatttggcaagtgaaccgactgttatgacgaatgttgctacggtaattacattagatgctgatcttgatatgtcgactaaagaggcatgggtaccggttacggagtttaaaggtgcattggacggcaatggcaagactatttccggtcttacaattgaagcaacaggaaacgatgccggtttgtttataactaataatggtatcattaaaaatttaacccttaaagatgtaacagtgaaacaagtgtcaggcgcagctggagcatttgcagcaataaatactggaacgattcagaattgcgttattgatggaggagcgttgactgtcaatggagcagatgctaagttgggggctattaccggacataatcagactggtgcgtcaatgataaaggattgtaaggtaaaaggtaatgtggtactgactgttgccggtggtaaagtaaatgccggtggattggcaggtgtgaacggatggtggtctaaggcacaaatacaaggttcttcgattgacaaggaggtatcctttgtatatagaggtaatggtgaaggtgccatcggaggacttgtgggttggaatgttcagggaaccataactggctgttattctttgatgactattactgcatttacagctgtgaatgccggtggtctggtgggaggaaacgaaggacctgtaaccgcttcgtttgctgctggtgaaatagtggccaaagcgtccggaaatattggcggtttggtgaaaaatggtggaactttgacaggatgttattcaacttctgtgctttctggcactgcttctgttaccatttgtggaatatcaacgggatcagtgacagcaaacgaatgttattttatgtccgacggagtttcgaatccgggtggaaacttaccaacttcaactaaggtaagcgatgctgctgccctgattgataaaattgcatccatgaatcaagcgatagctggctctggttacaagtatgttgaaaatacaggaaccgacagtgccagagtacctttactcattcaaccggatgaataataactgacaggtattagtttgaatccccttatttatccttgttttgtatatgaagaggacaaatagggggattcgtatctggaatatactatctttgtgtgtcgaagacatctttgggttgattgcgacatacaacatgacattcatcgtaaaataaaactttatatgagacgaatctttgttagcttactgcttttatctctgttttttatgggctatgcccatgagccggaattttcaacagccggtttcttccggttgccggataccgggcgtgatgtgtactcgatgaatcctgcctggcgtttttataaaggaagtgcggtgggtgccgaagcaaaagaatttaacgacaaagcctggcaggtggtgtctttacctaatggtattgagtatcttcctactgaggctagtggttgcatcaattatcagggggaagtatggtatcgtaaacactttactccatccgaagcattgaaaggaaagaaactgtttctccactttgaagccattatgggtaaaagtaagatttatgtaaacggtaaattattggcagagcactttggaggctatcttcccgtatcggtagatgtgactgatgcattgaagtggggagaggacaatgtgattgcggtgtgggctgataatagcgacgatccgacctatgcgcctggaaaaccacaagatgtgttagattatgcctacttgggaggtatttatcgggattgctggctgattgcacataattatgtgtttatcacggatccgaattacgagaacgaaatagcaggaggcggactgtttattgccaccgatcgtgtatcggagcaatcgacagatattctcttgaaagcgcatatacgtaatgaagacaaacagggctttgcaggaaaaatttcctattctttagtagaccgtgcaggaaaagaagtggcatcgtcagatgtgaaactgaatatccgtaaagggactgcgacaagtcataatggaaagatgaaagtgaagcagccgcatttatggactcctgaatcaccttatctgtataatctgtgtgtgcgtatttatgataagaatggaaatgtagtagatggttatcgtcgtcgtgtcggtatccgtagtatcgaatttaagggaaaagatggcttctggctgaatggaaaaccttatggtaaacctttgatgggagctaatcggcatcaggattttgcagttgtaggaaatgcggttgccaatagtattcactggcgtgacgccaagaaactgaaagatttggggctggaagtaatccgtaatgcacattgtccgcaagatcctgcttttatggatgcttgtgatgaacttggtctgtttgttatcgtgaatactccgggatggcaattctggaataacgaacccatttttgccaaacgggtttataatgatatacgtaatatggttcgtcgtgaccgtaaccatccttgtgtatggctgtgggaaccgatcttgaatgaaacatggtatccggaagattttgccgggtgtgtgaaagggattgttgatgaggaatatccttatccgtcctgctattccggttgtgatgtgcaagccaagggctcgcaatattttccggtacagtttgcccatccgatggatctttcaaaacgtgatcctaaaattacatattttacacgcgagtggggagataatgtcgatgattggagttcgcacaattctccaagtcgcacagcccgtaactggggagaacagcctatgcttatacaggctgctcattacgcttctccttattataattacatttgctatgatggtttgtataaagagtctccctggcatgtgggcggatgcttgtggcattcgtttgatcatcagcggggataccatccggacccgttctatggtggattgatggatgtattccgtcagcctaagtattcctattatatgtttaaggcgcaacgtccggctgtcgtttccgagagtttggcagaaagcggaccgatggtttatattgctcacgagatgacaccgttctcaagcagagatgtaacggtgtattccaactgcgatgaagttcgtttgactgtgaataaagatgggcaaacttatacctataaaaaagacaagacacgaaaaggaatgccttctccggtaataactttccccgggatatttgactttatggttgataagaagatgactcgtgaaaagcatgatgcggacgtctatttcctggcagagggactgatggatggcaaggtggtggctacacataaagtaatgcccgcccgccgtgcagaacagattcgtttgagagtagacaacgaaggaatcggactgcgtgctgatggatctgattttgttactgttgtggcagaaatcacagataagaatggaaatgtaaagcgtttgaataattattatatcaagttctttgtagaaggagagggacgtattttgggcggagctaatgtattggcaaatcctgctccggtgaaatggggcagtgctcccgtattgatccagtcgaccacgactcccggaaagattaaggtaagagccagtgttttgtttgagggatcacagatgcccgtaagcggtgaactggaactaacatcttccgctccaatgtatccattgatatttgataagaaagaagaagcgttgcctaagccatccgaatcgttctccatggacaagaagagtgatgctgaactggagttggaacgccgccgtcgtgaactgaatgaattaaaactgaaagaagtggagcaacaacagacagatttcggtgagaaagtagatttagactactcattacaacaatttactgttccggtgtgttttttagtaaccggagatagagagtaaatgatatattctttaggcacgggatacgcattccgtgcctaattttttatgtttcattttttatctctatctttgcgatacataataaataaggacgtatggaaaaaattgaaatagaagagaagattgtagctatgctaaagacagtgtacgatccggagattccggtcaatgtatacgatcttggactgatttataagattgacgtctccgatagtggagaagcggcactcgatatgacgctgacagctcccaattgtccggctgctgattttattatggaggatattcgccaaaaagtggagtcagtagaaggagtgaattccgccaccatcaatctggtcttcgaacctgaatgggataaagacatgatgagtgaagaagccaaattggaattaggttttctttaatcgttctatgtcaggcagtgctctgattttataagttgtaattcgttattagatctcgtaactggtaattaaatgaagaacatttattttctttccgatgcacatcttggttctcgtgctattgagcacgggcgtactcaagaacggcgtttggtgaacttcctcgatagtataaagcataaggcttccgccatttatctactgggagatatgttcgacttctggtatgaattccggctggtagttcctaaggggtacacccgtttcttggggaagctctccgaactaacagatatgggtgtagaggtgcatttttttataggtaatcatgacatctggtgtggagactatctcaccaaagagtgtggtgtcatcatgcatcgcgaaccattgactactgaaatctacggaaaggagttttatcttgctcatggtgacggcttgggtgatccggataagaagttcaagctacttcgttcgatgttccacagcaaaactttgcaaacgatgttttctgctattcatccccgctggagtgttgaattgggtttaacatgggctaagcacagccgacaaaaacgggcggacggaaaggaaccggattatatgggagaaaacaaggaacacttggtactatataccaaagactacttgaaaagccatcccaatatcaacttctttatttacggacatcgtcacattgaactggatttgatgttgagcgccacctcccgtgtgttgattttgggagactggattaacttcttctcttatgccgtgtttgacggagagaatctctttttggaagagtatatcgagggagagacacaggtctaattatgtttcaacaaaataaaaggtcaggcataatacggaacaaaatataaaacaagggcacaaagaagtagcagaaaaataacctgccatctttgtgcctttgtcgttagagaatcttcaatgcttattagttaaatcttcctttctgctcaaaacacccgctcgttattcggcaaagttggtgtataagcggaactcgtgtgcaggaacactgatctttttttctccctccacgggattcccattttccagatatagataccatgtaccttcaggaatagtataatcgatagatgcattggtgaaattcgcatacacatgaagttgtttcccattcacagctttcaatgtcagtgtacgtccattatcccaatcattataactgactttccaggtaaattgagaagaagcgttgaataaatcggagtgtgttgtccgtagagtgattagttttgtataaatatctaccaagcttttacgctctgtctgatattcccaaaggactggtttctttccggtacgtccattttcgtctattgaaatatcataccccatttcgccgaattgccaaagcattttcggacctggaaccgtaaagaagaatgcggcgttggatgataactgtttgagccgttcggacaggttggtttttaaggctccatttccgtattcaatctgtttataggcacaccgctcttcgtcatgactttccatatagcccacaaattgattcggacgggtggtgtcatataatccggagaaatcactattatctttccagcccatagccgactgacaataagaatggttcatattcctccaaaaatgaattccttctgtggctaaagttgtttcttcatttgcacagaaatgttccatggtaaccattgcatcttctttgacagcttttacggcttcgtagtattctttcagtactgatacacgagcagggtcggttgccgccaaatcatcatcacctgttgtctgtttctgtgtgaaacctttggtgaaatcgaaacggaaaccgtcgatgtggtaagtatctaacagatatttcaggttgcgtttgacaaaagcttttgtttgttctgaagtgtgattgaaatcatccggtgaaaaaacatacttctgatgcggtgttacagcgttcagccatggattcttagtggaagggcggttattaaacgtatcccaatacatacgggcaaacggattatcattgttcgtatggttgtagactacatcgaaaataacggcgattccattctgatggcaggcgtcaataaaagctttatattcattttgagttccatacgaggcatccagtgcaaagtatagtccggtgttgtatccccaactgtcattacctgcaaattcttgtacaggcatcagttcgatagcatctattcccagttcttttaagtaaggcagcttttccattgctcctgccagatttccactggaagtaaaatcccgcaacaagagctcatagataaccggattttctttattcttcatctcaaattctccggcactccattgatagggttgtgggtttgtgcttacgactgatacgtaaggtgcttgtgcgccagtgggaaagttggtatccactcccttttccaatgcttgctcacaataaggatcgcacaagtaagtaccgccatccgaagcactgtacacaaagtactggaactgtgtttcaccggcagtcaattcctccagagtgatccaccagcaatggtttgtttcgtcatatttcatcatgtagcgactatccagtttccagttgttgaaattacctgttacaaatacacaatctttatgaccgccctgactgtccttatcatataatacaagcgttatcgaagtggccgaatggatatgaataccctctttttcttctccggatatggggagaggggctttttgcggttcttcccagataaatccgttttgactatcttctactaaagttgcgtaatcgtaggtttgttggctaccttccgcatcacgtacaatcaggttaatggtctgtaagggagtagatggagcaacagaatagaaatggcggatagatgaggaaagggtgatactccacacattgtcctttgtctttttcagtctgtatttattctgattatctccccatgtaggtgcacctgtccaatttgctcctgttccggagtgtaagtacaagtcgtcagcgtaaccatagaagttacttccttcgggtgctttgaaggtgatagtcagtggttcatccgctttaggaatagccggatcaaaattaaatccgtcgtggagaacttgttcttccggggcaggatcagttccggacgaaggacgctcgcccggcatcaacggatcatcatctgaacaagctccaaagctgttgagtatcagcaataaaaggagccaaatatatttaaagtctttcataagccttattttagaattcttcttccaatgtagtggtactatatttagctttgagtgtgtcagatttcgatcatatctcaaatctcctctttcccgaagagggagacttgagatatgatcgtaattgattctactcgttgtgctgtttaagagtgtctgatagttattcgactttacctttgcctgtcgtaaagttaatatggactttctgaccggcttttacattacattcgtagccaagttcgcttagattatccgatacgttcttattctcacggtaaacgatagtaccatcgccttcattagccagatcaagtgtaaattcgctcttccaccagcctccggcatctacagccgtagtagaaatacgtgccatgcctgtaacggttgctgccggtgatatgaagtcgcttgttttatcggtcggaatcctgaacaaggtcgtttcatcgcaattccacgaattgttaatcacacctcccaacaggtaaacttccggcaaacggaatgaaattgtttttccttctgtagtcactgcgacaattaccagataccatccggatttaccaatgccaatattgcctcctgaggatgttaattcggcgaaatcaattgcttccggagataagatttcttcgtcataaccaaagtctccttcccattttctaaccggagcaaacttgatttggtctcccgccgtataatattgtatactccagaacattccgggagtctgtgtgacaggaaccatttcaggagctactgcccaatcccacccaagactgtacggagatccattgatgtacatgtgctcgggtagatcctccttgattgtgtatgtataatcttctacattaatcgtaattttcattttctttccgccggcgcaggtgagattatccgggtcggctccttctttatccctgaaagccaataatcccggatccggatcttctattactttggaagcacccaaggctctttgccaggcatccggagcttctatcgcacttcccgggacaatcttgaaatcaaacttctcttccgactcgacgactactgaaaagagatactgattgtctttgtctacttcgagctttgtggctgtcgatttgtccatctgccagctgtttagatcacctactatatagtattccgtatccacagccggagttgcgaccggagtgatggcagattgcatttccgggtattcagtcagtgaagttgcttcaccgttggttgtcatgactaccggtgtcagctttaaagtgacttcgcgctctaaagatttttgtgacttatacaaacttgccactttttggtcaagttctgtcaacctgacttttatattcccatcttttacttttgacggtagatttaatatctgcccttcggcaactaattctatattacaagctgtgagtgagaagttttctgcaatcgaagaaacagaggcgattaccacagaatcgcccggctgttcttcaagtttcatactggcaaccggagttatatctaccattgcagttatagcttcttcctggggattggactggggatcagcccagtccttaaaatcttcatcgcaagcggtgaaagctgccgaagcaagcaacagacacgccatatatgataatcttttcatgatattcagttattaaagttaacgattattgagtaacggaacctgttttctgaacaaagttcagatttattttctgccctgccttaacgtttatcgcatattcaggacctatttccgaccaactgtcaatcacacttttgttttcacggaacacgatttttccattaggtatagcgaactccgtacgccaccagtcttctcccggaactttgacggacatacgcaattctccgcctccggtgcataccggtgaaacaaagtctgcatctgccgttgttggtgcttggaatttgcctttatcgccgaatgtccaatctcctatagcattgcctatcagacaaacttcgcccggagcaatatccagcgtaaaggcataatcagtccctttgatgcttacagacatgatcactgtataccagcctgtgacattaacgctgatattttgtccgccaaatccatcatccgatccggtgaatgcatccgaggctattgtcagacgtggatcgttgaatccgatgtattctccttctttagtaccgaacttgaacatatcagtgcctccgaaatagaataaaccgaagaacttggacattccgtttactgctgccaaaggcacccagttgctccaattactatctgccatcgagccattgataaatatactggaaggtaattcgagaggcggtacagctttatatcccaatactttgggaagttcaattacattcgaaaaagcgatgccacgaccactattggtcagttccgctttcaggcgtacataaacgggtatgggagtggtcggaaattcttcatcggaggatgcactccacaagtctcccagtgccaatgcaaattctaaagctttcacttccattttggcagaagaatgggtagtacccaaagttgtataattagcttccgtatttgtctctgcatgagcgtcaacgaaattttcttccagtgaaatttgtactgaataagtggttgccatcggaatcccgtaatccggttgtgtacaggttaattccaatgattcggagtttttaaggtcgtacacgttgttggaagcaaaagctggcacattcagtacgaacgtatccggttcgttcaacacagggttgctgtcacggtctgcttcacaggcggacagagctagtagccccattgtcaatgtaaatagtttatataggtttttcattgttttcagtctttaaaacgtgaataaaggttctatcaatatcccggattctgagtcatatttgtattcgtcagcgtttctgttttcggtatcggatagagattatagatcgaactcacaccgtttccttcaaaggaaccgcctttccaatcccagaggtaggtgcttgaggtgaaatagccataacggatcaaatctgtgcgtctgaatccttccagatacaattcgcgggcacgttcatccagaatataatctaatgtcaggttattggcagagggtatttctgttgctttggcacggtctctgagggctttgatatccaaccaggcattttgttgtgcatttgcgccgcctgctctcaaataggcttccgcgcgaatcagataagcttccgccaaacggaagaacggaatgtccgtatcaggaattttagcatcgtgagcgggttgtccgtccgagcgcagattactccatttcataaatgaaagtccgtcggtgaatttacctacactttccagttcggctttgcgaccggttgtatagaacaaggcgcgttcatcttttgcagcagcctgcacatctctcacattctgccatttattatcggtatattcggtgaaaggaatatcctcactgtttgcgaagaacttgtcaaccagtgctttgcgtgtacggatacattcccaagggtcatttgttccgcgattcggcatgtcgctcttttgcgttgcagcaatcaggaagtaacttcctccgtaactctttgcttgtacaccatcctgacggatagaaaggatgatttcttttttagcatcgggattttcatcattgtctgccataaaaagttgttcgtaatttccacacaatccgtatccattggagggatcgagcactttgccggcataggtgatagcatcattccaacgcggttgtccggtgtatacttcggcattgagatacaaacgggcacgcagcaaccagcaagcagctttgtcggcacgtccgaaaggagcttgacgcggttcgctcatatcattttcgatgctttccagttcgctttcaatataagcgaacagttcggaggccgtcttttgaggaggattctctttggagaagtgttcggtgaaaggagcttttccgaaggtgtccatcagataatagtaaaataaggaacggagaaaacgggcttcggcacgttgctgaacggaggtagcatcctcttttccggcgatctgatccaggaagaaattgcagagtgtgatattatatgctaaacgattatataatatttctgtctgctgatgagaggagttccaacgcatataagttagttcggggataccggcattttcttgccaggtccatatcatctcatcagtgccatattcattgttagtgaaaagagcgcgatagaaacaggattgaccttcgtcctttactgcgatatccggatcttcgctcaatttttgtccggtaagtcccagtgaagcgtatagtttggtaaagtacatatcttggtcgaaggtggcagtcatctgaggatcgattggagatatatccaggtcattgatacaggaggtcattccggtggtcaggctaaggaacaacgctgctgaaactattgattttatatgtttgaacttcataatagtctactttttaataaattacaatcttagaactgaagacttagcccgaacaggatagtgatcggatgaggataaatgttcctgtcaatacctgctactccggcatcatttcctgaactgataaccgattcaggatcgagtcctgtatacttggtgataacgaagggattctgtacagtaccgtaaatacggccgttgatacctttataagcctgggacttcagtaaatttttgaagctataacctactgttatgttatcacaacgcaagaatgaagcattctcaacgaaacgatcggacagataatagtctccctttccttcaaatcccagattcacggcagctgtcgggcggttggaatagtatccatgattaaagattcctcccttgccgacactggatttactggccagtacgtcattgtacacatagttattcaggctggcacggagggcaaagcttaaatcccaatttttataagtgaatttggaagtcagtcccatcaatacgtcagcggcaggttttttatagatatatttgtccgaagcgttgatgacaccatctccgttacggtctacgaacatgttttcaatcggttttccatccttatcatacacttgttggtaaacgaagaatgagttcatcggataacctactttctgtacctggcaggttgcaccgctaataccagtagatacacctccggtttctacatagtaattagaatcatctcctccggtcagtttagtgatttcatttttgttccaagtgatgttatatcccaagtcccagacaaaatctttggttacaataggtttggcattgatggtgaattcaagccccgtattttttaatgaaccgatgttgctgatcagttgggtattaaagttagtccccgccgcaatctttacggtattgattaaatcgtcggttttccggtaatagtaatccatcgagccggagatacgtccgttcaggaaagcaaagtcgaaacctgcgttataagtcgttgtctcttcccatttcaggtcttcgttataagctttaggacgcatagtgccataataggtatccccgaaaggataataacctctggctgcgttgacgcggtacagtgccatataagggaaatcataatcgtcgcctaagttctgctgacccgtgataccccatccgaggcggagtttcagatctgacaatacttctacgtttttcaggaaattttcttctttcagtttccatcccaaagcaacagaagggaagctactccaacggttgtctttagagaaacgggaagaaccgtcctggcggaaagtggctgtcagcaaataacggctaagtaatgtataatttacgcgggcaaaataagaaactaatgtactgtgatgtccccaggctgtttgtgagcgcagattcggattgtaggcttcgcctgttaacggatttgttccttgtccgactttatatccggtatagtggaaatgttgctcttcaccacccagtattacgtcgacataatgatccccgatttctttggaatattgtgcataggcattcaccgacaggttatatttgtagccgtagtcagtcccgttccaaccatagtaataagagcccggggcataaggtgaatttacattcttttccttaccttccgagtagtcaccgcctacgttagcatggatatgcaggtcagggaggaagtggaatttatagtctacttctacattgctgataaaactggtgtttctggaagtatgtttctttagtttcagtagggaaacagggttggcggttgaattactttccagtgtaagcggccattccggatcgttatatgaactaccgtcactggtcggttggtagaatccaccgaagtttttgtacatgtccgaagagtcatatacaggttgggtcgggtccatggtcaaagctgcgccgatagccccgtcgtcagcataacgttggttggcccacatcattttagcattgatattgaacttcaggtgatctttaaagaaagagggtgtcagattgacggaggcggtataacgctcgaaattagatgtcatcaggatcccattctgattggtgtaaccgaaagaaacacgataaggcatatttttcaaaccaccgcttacagtcacgttatggtctgtactaacggctgtctggaaaatttctttctgccagtcagtgtttgcttcaccgaaggggcttggagcatttccttcaccataaagtttggatacgtatcctttgaattcattggcatccattacgtctattgtcttttgcagtataccggcggaaacgttaccttcatagttcacctgtggtttgctgcctgctttccctttctttgtagtgatgataatcacaccattagaagcacgtgaaccatagatggcggtggccgaagcatctttcaaaacagtgaaagtttcgatgtcattcgggtttaccattgccaaaggattagtcaaaccttgcacaccgctattatccattgccagtccgtcgataacgatcaacggatcgtttttggcgttcaatgatgaaccaccgcgaatacgaatcgtagctcctccacccggagtaccgctggaaattacattcacaccggctattttacctgttatcatatcctgtgcgctggtgattactcctttgctgattttatccggcttgatggcagtaactgatcccgtcaagtcgtttttctttactgttccgtaacctacaacgactacggcgtccaatacttgagagtcatcttccagtgtgaccattaccgaaggagctgctttaatttctgctgctttgtaaccgacgaatgtaatggacagaatagaattttgaggaacattcaatgtgaagttaccgtcaaagtcagtgatggtacccgttgtggtacccttggcaatgacattggcgccaatcacgggttcgcccatagcatctttcacatgtcctttgactgtgatttgctgtgcataagcgcccaatgataaaaacatccctattaacaaggggagaatcgtttgaacgattctaaatttaacttgcttcatgcatttaaaaaattaaagttaacaatatagtaatattatttctctctcttaaaagtttctttaaaaatacctattgaaaacactttttttaagactatcctttatttatagtcttttcaatcccttaaactctgatttgtttttcacctctttgatactgattgcgtatccaccgccattggcagcgtgcagattcagtttgcttttattattcaagataccttttttgatggtgtatgcctgcgggttatctttccagtcggtatctttggcatctgcgtatacggtagcgacgtattgttttcccggttccaggaaatcgaacgttaattgggagtcgtggccgttttcaccggctgtgcagcctatgtaccagtcgtccgttccttttgctttgcgggcaattgtgatgtattctcccggttctgcttccagatagattgttttgtcccagtcgagagcgacgtctttgataaactggaaagcatccataaagcgttcgtagttttccggaatatcggcagccatctgcaaagggctatacatggtgacatacaatgccagttggcgtgcaatggttgaacgtacctgggagttgtttgccggattcatctggttacagtgagtctcgaagatgccgggagtgtaatccatcggaccaccgaccaggcgtgtgaaaggcagaatcgtcgtgtggtatactttatttcctccaaatgattcatattctgttccacgtgcggattcattaccgatcagattgggatatgtacggcagataccggttggacgggttgcttcgtgtgcattgaccatgattttataatcggcggcttttttcacggcatacaggtaatgattattcatccattgaccgtaatgatgttctccgcgtggaatgatattacccacataaccgcttttaaccgagttatatccattgtctaccatgaattggtaagctttatccaggtgacgttcgtagttgcgaacagatgcagaagtctcatggtgcatcatcattttaattcctttgcttgcagcataacgatggatttcctgtacgtcgaaatcaggatatgcagtcaggaagtcaaatacatagtctttgctgttgccgaaccagtcttcccatccttcattccaaccttctaccagcactgcatcaaatccgttggctgcggcaaagtcgatgtaacgtttcacgttagctgtattggcagaatgtttgccgttcggtttggttttggagtagtctgtaacgccaagtttcacgctggtcagttcatctgtataagcccaggaaccttttccggtaatcatgtcccaccatacgcctatatatttcaccggtttaatccaggaggcggcgtctgcaatcttacaaggttcgttcaggttgagggtgatgcgggaggcgagaatgttacgtgcatcatcactgacgatgatcgtacgccacggagagttgcacggagtctgcatgtaacctttatccccttttgcatccggtgtcagccaggattcgaatatcatgtttttgtcgtccagattgaggtgcatacaagaataatcaatcaaagcggcttcgtgcagattgatgtataaaccatcatctgttttcatcatcagtgccgtctgtacacctgtcggtgaaaatggggtttgagaagaatttggagtgatcgcctgttgcatcaaacctctgatttccgatagacgggagatggtgtagtcgtactcttgagtgtcgtaatcgcccggtatccagtatgcgatatggttgcctgccatggcaaattgggaatgttcttccttgataacgaagtagttcagtgatttctgttgcggaaattcataacggaatcccaaaccatcattgaacaggcggaagcgaacaacgatggaacggtcgttcattggctgaaacagaatgactgccagttcgttatactgattgcggatttccttttcttctccccagactggttgccaggtttcgtcaaaggtagtcgtttgcgcatctttcagcttgaagccattataaagattggatttagaatcgagcttggtgaggtctctgcggtctacccagtcaaagtcggttctggtattatcttcttttttcaattccagtccgagagtgctcggcttaattaccaccttgcctttgtaagtcaagtcgtaggttggtgcgccttctttgttaacctgaaaggtcagaaccagattgccatccggtgaggtcagtttctgttgtgcattcgcaatgaatgagatgcaaaggaatgcgatgatcgaaaaaaactttttctttttcattctatttatggtattaaattgtaagctaaccgatatttctattcctgtttgtttcggatattgcaaatgtagcaaccaccttcacttttttgcttgattagaataaaaatacaagtttgtataaatgctagtatcttgttttataattgtttatctatctgatttcattggataaatataagtcgtagtgaacttgcttagaaggctaaaaggtatatcccacggcttggaagtgttaattcatttcttaattcaatctttttgtctgtgagcaaatcatgagcagacgaggtggagagtatttcctgataaggatgtaagtcaatagtctgttcccggtcgtttccattcagaaagacaacgactgattggttaccgtatttgcgttcataaacataaatgcctttattgggtgcgaaatgttttagtttgcctttggcgatgacttcatttccttttctccattggagcagtttttgcataaaagagaaggcttcattttgttgcggagtacggttggttgcttcaaaacagtttttggcgtcattctgccaacctcccggaaagtcacatcggagtaatccgtctccatttgctttgtcggctgccatcaggatttcagttccataatatatttgtggaattccacgggtagtcagtaagaatgtcaaggcttgtttatatcggttcaggttcttggtatcttcctccgaacggtagaaacgggaagtatcgtgattatcgaggaaggtcagcagactcattggatcggcgtagacaatatcctgtgagaggtattcgtagagtctgaaaagtcctccgttccattcggtggtttcttcgtcgaaagctttatttatttcttccatcagtgggaaatccatgacagtaggaagataactgtttttcggataagcaagtttactgtctttctgccagtaggagatcagtacattgctgcccagccatgtctcaccgacaatgttgaatgaaggatattcatcattgaccgctttgcaccaatgcgccatcatttcaaagtcggcgtaaggatgtgtatcctggcggattccgttgatacccgcatattctatccaccagatactactctgtatcaggtaagtggctacgtgacggtttcgttggttgaagtccggcatagtcagtgtgaaccaaccgtcaatggccagctttttatcataatcggaagtataagggtccatttgggtggcagttttgaaactggtctgcatgtagtttccctcaaagttgaaccaatctttggcaggcatgtctttgaatagataattgttcgaaccgcaatggttgaagatcatgtccatgactacctttagccctttagcattggcttcttttacgagattgcgaaactcttcattgcttccgaggcgacggtctacttgatagtaatcggtgatggcatatccatgataagagccttccttcatgtcattttcctgaatcgggttaagccatatactcgtaactccgaggtctgcaatataatccaaatgtttctctattccttttaaatcaccgccatgacgggcgaaaggttcgttgcggtctatgtttgcttccaacattccgggaattatatcattggaggggttgccgttggcaaagcggtccggcataatgagataaagtacatcactggagttgaagccttctactgctgaagcattctctttgcgctgtttaagttcgtatggtattttagtctgttttttaccttgtttcaggagaatgtcgaagtgctgagggatagcttttgaaagatctaaatataagatcagataattaggattttcctgtttcaccacgtcctgcagggtgatgtcattagaagaaatacttacctctgcggatgatatgccatcgccgtatagaagtatttgtagttcgggattcttcattcctgcccaccaaaaggtaggagccactttctttatattggttgcggcgaatgcttgatgataacccgatagaagtaatagtaaaatagcaaataacaaatttcgtttcatggtagctagatttttaactgtttgctcggagaaccgatgatgcaaatgtagggggatgctgtgcacctttgtgagattagaatggaaatataaacctgttatctgactatgttgctgataattagttggatattctaataccttatgccgaaaaatacaagtgaaaatgaaaatagttatacccatatttttcgttttcattactatatttcttatatttgtaacatctttaaaaaggaaccttatgaaaaatctaaccctttatatgctatttcttcttttgctctttcctttttcgttgtgtgcaatgcatacggataatgcggctgctcttaaaaagctggatgaagttataagcaagaaagagactttccagattcggaaagagaaagagattaataacttgaaattagaacttgcccattctactgatcctgttcgaaaatatgaattatatgcctctctttttggtgcttatttgcattatcaggcagactcgtccttatattatattaaccgtgagatggaaatccttccattgttgaaccgcccggaattggagtatgagatcatcattaatcgtgctacggtaatgggagtaatgggaatgtatatagaagccattgaacagttggagaggattgatcctaaaaaattgaatgagtggactcggttatcttattatcagacgtatcgtgcctgctacgggtggttagcagattatacgaccaataagaatgaaaaagaaaagtatttgaagaaaaccgatttatatagagattccattattgctgcgatgcctccagaggcaaacaaaacgattgttttagccgaaaaatgcataatgaacgggaaagccgatgtcgctgtggatatgctgaacaatgctttgaaagaaattcaggatgaacgtcagaaagtatatatttattatactctttccgaagcttatagtatgaagaaagatatcgaaaaagaagtttactatctgattctgactgccattgcggatctggaaactccggtgagggagtatgcttcattgcagaaactcgcgcatctgatgtatgaatcaggagatattgaccgtgcctacaaatacttgagttgctcgatggaagatgctgtggcgtgtaatgcccgtttgcggtttattgaggtgacggagttttttccgattatcgacaaggcgtataaattaaaagaagaaaaagaacgtgccgtttcccgcgctatgttgattagtgtcagtttgttgtctttgtttcttctgattgctattttctatctatatcgttggatgaagaagttgtctgttatgcggcggaatcttagtctggctaacaaacaaatgtctgcggtcaacgcggaactggagcaaaccggaaaaataaaagaagtctatatcgcccgctatctggacagatgtgtcaactatctcgacaaactggaaacttatcgtcgttcattggcaaaattggcaatggcatcgcgtatcgaagatttgtttaaagctatcaagtccgaacagtttatccgggatgagcgggatgaattctataatgagttcgacaggtcttttctgaaacttttcccgaactttatttcagctttcaataatttgctggtagaagaaggaagagtgtatcctaaatccgatgaacttctgacaacagaacttcgtatctttgcccttatccgtctgggagtagtagacagtaacaagattgctcattttctcggttattctttggcaactatctataattatcgtagccggatgcgtaataaagctgccggagataaagatatgttcgagcagaatgtaatgaacctataatgttattcacagatagcaatatgttattacttcgtaatatacgagccaataatgcttgtgtataaagcaaatatctacttttagtgttcaataatccactgtgcatctctcttttttttctacctttgtagacaactaatctaaaataaatatactagaaaatgaaaaagttagtctacacactgttctttgtccttatctccgttgtagccaacgggcaggcaaagtacgtattctatttcatcggagatggaatgggagtcaatcaagtaaatggtacggagatgtatcaggcggaaattcaaaatggtcgtattggagtcgagcctttgttatttactcaatttccggttgctaccgtagcaaccactttctctgctaaaaattcagtaacagactctgcagctgcaggtactgcattggcaacaggaaagaaaacttataatggcgctatttctgtaggagaagataaaaaagctattcagactgtcgcagaaaaagcaaagaaagcaggaaaaaaggtgggcgtaacgacttctgtcagtgtggatcatgctactcctgccgcattttatgcacatcaacccgatcgtaatatgaattatgaaattgctcttgatttgccgaaagccaatttcgatttttatgcaggcggtggtttcttgaaacctaccaccacttatgacaagaaagaagctccgagcattttccctatttttgaagaggcaggatatacagtagcacgtggttacaatgactataaggcaaaagctgcaaaagcagaaaagatgatcttgattcaggaagagggagccaatccttcttgtctgccttatgctattgaccgcaaagagaatgatttgacattagcacaaattacggaaagtgctattgactttcttactaaaggcaataataaaggctttttcctgatggtagaaggaggtaaaatagactgggcatgccacgctaatgacgccgctactgtgttcaacgaagtgaaagacatggataatgccatcaaagtagcttatgaattctataagaaacatccgaaagaaacgctgattgtgattaccgcagaccatgaaacaggtggtatcgtgctcggtacgggaaaatatgcgttgaacctgaaagcattgcaatatcagaaacattctgctgacggactttcacaacgtatcagtgaattgagaaaatcaaaaggcaataaagtcacttgggaggacatgaaaacattcctcggcgaagaaatgggcttctggaaacaattccctctttcttgggaacaggaaaagacgttgcgtgatgaatttgagaaatcattcgtgaagaataaagtcgtatttgctgaaagtatgtactctaagagcgaaccgatggctgcacgtgcaaaggaagtgatggatgaaatcgctatgataggttgggtaagtggcgggcactctgccggttatgttcctgtatttgctattggtgcaggttctcaactgtttggtgagaagattgacaatacagaaattcctaaaagaattgcgaaagctgcaggatataaataatagaactgtatgaatataaaaatagccggaagtccttggactcccggctatttttatatgtttttgcaaattatgctttcacacgtcctacgtaagaaccgtcacgagtatcgatttcgattgtttcaccctcgctgatgaacaaaggaacacgtactgttgcacctgattccacagttgcaggtttcagtgtgttagtagctgtatcacctttcatgcccggttctgtataagtcaccttcatctgaaccttgatcggcatgtctgcataaagtacagtttcagtagaagcatcagaaacaacttccaatactgaaccttcgagcaggaagtcaacaccattaatcagatcgtgagcgataggatgttgatcgaatgtttcctggttcataaagatataatcttctccttctttatacaaaaattggtatggacgacgttctacacgtacatcttccaacttttcaccgatgttgaaacggcgttcgagaacgtatccgctaactacatctttcaatttagtacgcataaaagtgttacctttacctggttttacatgcaggaattctacacagaaatagagctttccgtccatacggatacaagttccgtttttgatgtcttgagcattaatcatactgctatttttcttattatattattgttatttaattgttttcgcaggaattcgactgcaaaagtaatctaaatcggtaaaaaacacaaaaacttttgagcaaaaatgagttatctcttggttaatttaaaaaaagtgcctatttttgcagcccgattacgtagaataataacataaaaacaagatacagtaatgaaaagaacatttcaaccctctaacagaaagagaaagaacaaacacggtttccgtgagagaatggcatcggctaatggtcgtagagtattagctgctcgtcgtgcgaaaggcagaaagaaactgactgtttctgatgagtacaacggacaaaagtgataatcacttgtcatcaggaaacaaaaaaggcggagaatttaatcttcgccttttttgtttctctgtttttcaaggggatagtatgttaaaaagcggtattgtttgctcttatttatgactttttgcttttctttgtgagattaaataaaactcataaacgaacatacgcgatggtagagtatatccgggacatgaaaccccgtatcattataataaggttgttgaaatctataggagtggggattatagttgcagcaattctggcgatgataagcgtctttgcataataggtagggacatttttcatcgcctactttttaaaagttcaactattttgtcgtatctttggcgcatattaacagcaatgcgtatgactattaaagaattcttttcttttaaaaccaataaatatttctgggtgaatattatcgccatgattgtggtgatggtagtgatgatatttggtgtgttgaaatggcttgatatacatacacatcatggtgaaagcgtggtagttcccgatgtgaagggaatgacagtggaagaagctacgaagatgttccggaatcacggtttggtatatgtgatttctgataccaaatatgtcaaagataaagcagcgggtatcattcttgaactgaaaccgggagccggtgaaaaagtgaaggaaggacgtacagtatacctgacagtcaataccctggatgtccctttacgtgccattcccgatgtggcggacaacagctcgctccgtcaggcacaggctaagttactgaatgctggtttcaagctgaatcaggttcaattggtaaatggtgagaaagactgggtgtacggtgtgaaatatcagggacgtcagttggctgccggagaaaagattcctttaggggcttctttgacattgatggtgggagacggctccggtgatatgtcggaagaagaggactcggtcgatgtttccgtggatacggagaaaccggttacgtcggaatcatcacctgctcaagatgatagttggttttaatagataaataacagaaacggactcgcatgatagaggaagaacttccggatgaactggagaatgatttggatgatatagaacctgtcggtgacgaatcccagctttacgaacacttccgcgtggttgtagacaagggacaggcgatggtcagagtcgacaaatatctgttcgaacgtattgtcaatgcttcgcgcaaccgtattcagaaggctgccgaagacggattcgttatggccaatggcaaaccggtgaagagtagctacaaagtgaaaccgctggatgtcattacggtgatgatggaccgtccccgttatgaaaatgaaattattcctgaaaatattccccttactatcgtttatgaagacccttatctgatggttgtgaataaaccggcgggattggtcgtgcatccgggacacggaaactatcacggcacgctggtcaatgcgctggcctggcacatgaaggatataccggattatgatgccaatgacccgcacgtgggacttgttcatcgcatcgataaagatacttcaggcttactggtgattgccaagacaccggatgccaaaacaaatctgggaattcaattttttaataagactaccaaacgcaaatatcgtgctttggtgtggggtgttatggaacaggatgaaggaacgattgtcggtaatattgcccgtaatccgagagaccggatgcaaatggcggtgatgtccgatccgacagtgggcaaacatgccgttacacactaccgcgtactggaaagactgggatacgtaacccttgtggaatgtatacttgagacaggacgtactcatcagattcgtgtccacatgaaacatatcggtcatgtgttgttcaatgacgaacgctatggcggtcatgagatactgaaaggaacccattttagtaaatacaaacagtttgtaaataattgctttgacacttgtccccgacaggctttgcatgctatgacattggggtttgtgcatcccgtcacaggtgaagagatgtattttacttccgaacttccggatgacatgacccggcttatcgagaagtggagaggctatataagtaatagagaattagaatgaaacgcaacatcgctatcgtagcaggaggagatacctctgaaatcgtagtttccctgcgtagcgcacagggtatttattcctttattgataaggaaaagtataatttgtatatcgtggagatggaaggccgtcgctgggaagtacaattaccggacggaaacaaagtgccggtggatagaaacgactttagttttacgaacggaacggagaaggttgtgttcgactttgcttatatcaccatccacggtacgccgggtgaggatggcaggctgcaaggctattttgatatgatgcgtattccgtattcctgttgtggagtgttggcggctgccattacttatgacaagtttacctgcaatcaatatctgaaggcttttggagtgcgcattgccgaatcattgttgttgcgccaaggacaatcggtttctgacgaggaagtagtggaaaagattggcctgccttgttttatcaagcctagtctgggaggttcgagtttcggagttacgaaagtgaagacaaaagaacaaatacaaccggccattgttaaagctttcggagaagcggaagaggtgattgttgaagcgtttatggacggaacggaactgacttgcggctgttataagacaaaagagaagtcggtcatctttccacctacggaagtagtgacgcacaatgagttctttgattatgatgctaaatataatggacaggtagatgaaatcactcctgcgcgtatctcggatgaattgaccaaacgcgtacagatgctgacttcagctatctatgatatattaggttgttccggcattatccgtgtagattacattataactgccggtgaaaaactgaatcttctcgaagtaaatactactccgggaatgactactaccagttttattccccagcaagtgcgtgcagccggactggatataaaggatgtgatgactgatattattgaaaacaagttttaagtattaagtatcaagtataaagtattaaccatgcggtttgtacgcagtctaatactttatacttattacttaatacttgagcacataatacttgagacttatggatctgacagagtttaatgaaattcgtccttacaatgatgaggaacttcctcaaatctttgaggaactgattgccgatccggcttttcagaaagctgctaccggtgctataccgaacgttccatttgaacttctggcgcaaaaaatgcgtgcctgtaagactaagcttgattttcaggaggcattttgttatggcattttgtggaagatagcggcagatcatactgccggactgacactggatcataccgccataccggataaaagtaaagcttatacgtatatatcgaatcatagagatattattcttgattcgggctttctctctattttgttgattgaccagggaatggatacggtagaaattgcgattggcgacaatttgcttatttatccctggattaagaaactggtgcgtgtcaataaatcatttattgtacagcgggcgttgaccatgcggcaaatgttggaatcttcagcgcgtatgtcccgttatatgcattacaccatttcagagaagaatcagtctatttggattgcgcagcgtgaaggacgtgcaaaagattcgaatgaccgtacacaagacagtgtattgaaaatgttggcaatgggaggtgaaggcgatttgatagaccgcctgatggaaatgaatattgctccgcttgctatttcatacgaatatgatccgtgtgattttctgaaagcgcaagagtttcagctgaagagagacatcgaaggatataaaaagacgacacaggacgatttgattaatatgcagacaggtcttttcggatataaaggcagggtacattttcaggttgctccttgtttgaatgatgacttgcaaagcttggaccgttcgttgccgaaaccggatttgtttgcccgaatttctgcttgtcttgatcgccgcatccatcgtaattaccggatatatccgggaaattatgtggcgtatgattggctgaatggcacaacggaattcgtgtccaattacacggaagaagagaaacagcagtttatgaactatattgaacaacaattggcaaagatcaagattccgaataaggatgaagactttttgcgtgagaagttgttattaatgtattccaatccgttagttaattatttagcagcttgccgatgaaaagaagaaaattacatgttgtttggttgtggggattgcttttcctgatgactgcctgtggagatgatgactattattatccttcggtgaaactggaatttgtgactgtagaggccggagaagacggtcgtatacaaacgcttattcctgataagggagaagtcttgactgtttcggaagaccgtacgggttctactatctctccaaacacttccagacgtgtgatgagtaactatgaggtgctttccggtgagaacactgctactatatattctttgcaatcgctcataacgccggtacctaaaccggaagatgatccggtttacaaggacggtataaagctggatccggtagagatggtcagtatctggctcggaagggattatctgaatatgattttgaatctcaaggtcagtacgggcaagggacatactttcggcatagtggaagatgtgtccgaacttaaaacaaatggcattgtgaatatgttattatatcatgatgcgaacagtgatggagaatactataatcggcgtgcttacatttctgttcctttggcgcaatatatagatgaagagaatccgggtcggacgataaagattaaatttaaatattatacgtacgataaggatggctctccgatagaatctgataagtactgtgatcctgggtttgactatactccgggacagaattgaataatggagtgtatatgtttaaattgaatcaattaatcgtgggaatatttttatttctctcttcccttttctcttgtcagcagaaaggggattttcaatcaatgaatgtagaggagtttgattctcttattcagaatgaggatatacaacgtctggatgttcgtacacttgcggaatattcggaggggcatatcacgaagacgatcaacatcaatgtgatggatgactcttttgcttcaatggctgattctttgttgcaaaaagacaaaccggtggctgtatattgtcgcagtggaaaacgaagcaagaaggctgcggcaattttgagcgagaagggatataaagtctttgagcttgataagggatttaattcctggcaggaagcaggtaaagaaatagagaaataaagtgctgatttatcagcactttattttttggggttatttcagtccttccaataaccttttcagaacgacagttgccgagatttcacggttggcagcttccggaatcacaatagattgcggactttcaatgacatcgtctgtcacaatcatatttctacgaaccggaagacaatgcatgaaataagcattgttggtaactgccatttggcggtcgctgacagtccaatcacgatctttgcttaatatctgtccatagttgtcgccagaataagcagcccagttcttggcatatatgaagtcggctccttcgaaggccttcatctggtcatattctacttttgcattacctacaaattgcggatcaagctcataaccttcgggatgagtgatgacaaattcgtaatccgttgcattcatccattcagcaaaggaattaggaacagcctgtggcaatggacgtggatgaggagcccaggtcataactactttgggacgtactgttttcttgtattcctcgatggtaatcaggtcggcaaagctctgcaatgggtggcgtgttgccgcttccatcgaaaagacaggacgtccggagtattggatgaattgattgataatagtttcctgatagtcaaagtcacggtcttcaaaacgggcaaaagagcgtactccaatgatatcacaatagcatcccataaccggaatggcttctaatatatgttccggtttatcaccatccataattacgccacgttcagtttccaatttccatgcaccttgattgatatccagtaccattacattcattcccaaattgatggcagctttctgtgtgctgaggcgggtacgtaaactagagttgaagaagatcatcattaaagtcttgtttcgtcccagttctacatatttgaagcgctcttttttgatttcgaatgcttctgcaagggctgattttaaatcgccaatgtcctgtacacaagtaaatttcttcatatcatttattttttaatttttaattagcttcgctcaaaaccttgtttgatttttaacatataggtatagtctcaatttcttctcgtttgtccatctccttcaatgacccatttgtaagaagtgatttcctccagtcccatcggaccgcgtgcgtgtagcttttgcgtgctgattccgatttcggctcctaatccgaattgtgccccgtcagtgaaagcggtagacacattggtgtatacgcaagctgcgtccacgattctggtgaataaagctgcacgttccccgttctcggtaacaatacactcgctatgtttagaactgttttcctgaatatgtcctaaggcatcttcgaagctctttacagtcttgacagccattttataatccagaaactccgtgccgaagctttctgcttttgcatgttccaggagctcggcaggatagcggccttccaatgcctggtaagcttgcggatcagcataaataatgacatggctgtcttttagtttctcgcaaatcagagggaggtcggccagtctcttctcatgtataatggtgcagtccaatgcattacatacgctaactctacgtgtctttgcattatgaataatgtctgctcccttgtttgtatccccaaattcatcgaagtaagtgtgacagatacctgctcctgtttcaatgacaggaatccttgcattctcgcgtacgaaatgaataagactgctgctgcctctggggataatcaagtctacgtagcccacagcattcagtaacgctgccgtagcctctctatcagctggaagtaattctacaatgtgcggattgattttgaacttcttcaatactttgtgaatcacactgatgatggcccggttggaacaatcggcgtcacttcctcctttcaatatgcaggcatttccgctcttcagacaaagggagaaaacatcaaagctaacattagggcgtgcttcataaatgattcctatgactccgaaaggaacgctgactttcgtcaacttcattccattgggacgaacactctctttcaacactttacccaaaggagaggggagtgttgctacattgcgtgtatctgcggcaatacctttcaaacgttcttccgtcagtttcaaccgatcgtacttcggatcatttttgtccatccgtgcgaggtctttttcgttctctgaaagaatgaaaggtgtttctgcaattgctgcgtcagctactgcatttaaaatctgattgatgacattatcattcagcagggctaattcccgacttgctacttgtacagcggcaaaggtctcgtttaaatttgtagtcatttgctccttttttgcattaaatggaaagataaactatgcaaatatagtgaatgatgtgaataaaacttgttgaaaatagaaataaatgttgctctttacttattcactggtttttttacaagattaatactaaaaaaatacgagactcaattctgaatctcgtatttttcatttatgcactatattggtatagtgcttgttattcgaactcctatttggcattatctcattgccatggaatgtcttgttcaatatcttctcccatttctcctgattcgacttcaattcctatgtcactaggtgttcctatatgttcaatattggttagtgcgatagaatgggtatagtttctcttgaatgtgatactgctactgatgattgtcttttcttctgctcctggagtctcttcccaaaatacttccacttttacattctctgttaaatgttgattatcaccagtaggtatattggcagtgagatttctcatgctgaccatttttaattcagattcaacagtcttatgaatatctgcattagcattcaaatagatgcttggtgcgtcttcaagttttattctaagacgtcctttctctaaacctgtttgtttgaattttactccgaaaaaacggcgatagagcatgatgtgattttgcatgccatctgtcacttccactttatcgtttaatccatgataacgttcgatgaacgggcggttgcaggcgtcttgtgatccgtttctcgtttgtattctcgggttttcaatgttgtataagaatttgattccatctgcttgttcggcagtcaggaatttgttcaggcattcccctttgatttttccgctacgttccaaatcgaaaggggctccgaagaagcctttttcgtcttttatgattgagtcctttgcatttgcaatcatagagcaagagatgcggtaagtgtatccatcaataacttttatttttaggttattgggatctttcgccttgtctaactggaaaataccataagcgtatggttttgaagatggattctgtccctctttgggtgtcatggtaatggcgattcccactaatgtttcactttcattaattttggttggagttgtagcacgtgccatgggcagttcggttgagaggtagtctccgtccagttgtaagttaagttcggaatacgtagtaggaggtgcctgatacagatctttctccttaatacatgattgtagagtaaaagctgtgaatagacagcctgcgatcataagatgtttgattttcatatgaatcttttttagtagttgttgagtatgataattatttccctatttcttgttctgattcttccatttctgcttcttcaccaaaagagatagtagcatcccctatatgctcatctatcttgactattttgattatgttctttttgtttcttttcattttaatactctgattggtatatagagaataccatttctcttcattggccgggcggtaggaaatagtgaaagcgattgtttcttcttccttaagtttggccgtataatagttggatatatcgtacatagagataattcgttcctccgtccgggatgttccatctttggaatatagtagataaaatggagcaacgtccgctgctttaattttgatggagtcacccggtgcaagttcgtctgtaacgaattgtatagaataataagcacgtttcaatgtcattgaaacggaggtattcatattgggatttgaaaagtccaattgctcactgccgaaaaagcgtctgacggtagggtgagtactagtactatcgcattttatatgcatttctcctttgtaaatatgttggtgaaatgccccattgatattcaggggattgattgaaatctttaaatcgttgttgactaacccgttcacctctttctgcagagtagatgaaaaaggaagtccataaagtatgctgtcactttgtattgtataatatgggcggtctttatatcccaggaagctgcagtcaaagcgatacacatatccttcgattaacccgatttctactcgatatggattatcgaaaaggcctgaagcatagggctgaaaagaagtcaggccttttcctttccaaaaaacattaactgcatatattccgtcagccaccgtggaggtggaacggcttaaaggttgttcggctacttcaagaaaaggagctatatttaaactgacattaaactttctgccgacaggaaatgacggtgtactgtttacttcaggttcattcttactgctctcacaagatataattgagaatgttaaaaatatgagtataaggttccaatgttttagtagcatggggattatattgtttgtttagagggcaaatatactgctattaatagttttttgcaaataaagtccctgtatttatgttgcagatgtctatctataatacattatataactgaaaataaaagcgcttatcttcactaaagaagctaatattctacctgaataagagcttcatttgggtgcagaaatgaggtaaactcatacaattataattcaaaaaaacttccgtaaacattctcaactatacttatccctatgagaaaaaatactcatagggatgagaagaaatactcattacaatgagaactttttctcattgcagtgagaatatccccttgctagaataggatgaaacagtttattaccgtgcagtcatgaacaagattcacctctgtgtactctgtggtgaaaaccgtacagaaacaagctaattttagtctaaaatcggataaaacagaaattcttattattaattattcaatgtatagatagtcataatgtactactggtttctttccatgcttgccaatcgcttcttgtgcctgtttggagtcacagttcacttttccaacgccaacctggtttccttgaaagtccatgatacgtacaatgtcatctttctcaaattcaccttcaatatgagtgattccgatggggaggatactgacagccttttcagagtttagaacttctgtcgcacattcgttgatgtgaatttcccctttggcaaacccttcactatgggcaatccactttttgacgctggataccggttcgtctgatggtataaaacgtgtacaaagagtttcttcaggatgctgtaataaatctaccagaatattatcccgcttcccgttggcaataatcactgtaattccttcatcagcaactttgcgggcaatattggttttcgtcaacatccccccccgtccgaaactggacttagttgtctgaatatagttggataagtctttgccgtgaccgatctcccggataacagaagagtttggatcggaaggagaaccattgtaaatcccatcaatattacttaggataatgagtgcctgcgtgtccatcatcgaagcgatgagtccggacaattcatcattatcggtgaacatcagctcactgacggaaatcgtatcgttttcgttgacaataggaatgacattattttcaagcattaccgtcatgcaatttttctgattcagataatggcggcgagttccaaaactttccttcgttgtcagtacctggccgacaggtatattgtgctcacggaaaagttcgtagtaacggttgattagtttggcctgacccacagcagaaaataattggcgctgatctacactatcgagttttttctgcggatgcacttcactgcgtccggaagcaacagctcccgaagaaatcaaaatgatttctaccccggacttatgtaattccgctatctggtcaacaagtgccgacatacgggtaacgtccagcgttccgtcgcggcgtgtcaatacattgcttcctacttttactgcgattcgtgtaaattcctgtttcatccttactaacgatttgaaagcacaaatatagagctttttgccgatatgctacctaaacaggctaaaaagaattatctttgcagccagatagagaaaagataaacaatgaaacatacaaatccacaagtagaacagatgacctccttcatcgtaatggatgtgttggagagggcaaacgaattacagaaacaaggtgttgatattattcatttggaagttggtgaacccgattttgatgtaccgtcttgtgtgtcggaagcagcaaaagcggcttatgatcgtcatcttactcactatacacattctttgggggacccggaactccggcgggaaattgctgctttttatctacgggaatatggagtgacggtagatccggattgcattgtggtgacttccggctcttctccatccattcttcttgcgttgatgttgctctgtaatacggatagtgaagtgattctttccaatccgggatacgcttgttaccgtaattttgtgttggctacccaggctaaacccgttttggttcctttgtctaaagaatatctgcaatacgacatagaagctattcgtaaatgtgtgaatccacatacagcggctatctttattaattctccgatgaatccgaccggaatgttgctggatgaaaaattcttgagagaagtggcagcactgggagttcctgttatttcggatgagatttatcatggacttgtctatgaaggacgtgcgcacagcattcttgaatataccgatcaggcttttgtcctgaacggattttctaaacgttttgcgatgacaggtcttcggctgggttatttgattgcacctaaatcttgtatgcgttctttgcagaagttgcagcaaaatctatttatttgtgcgtccagcgttgcccaacaggctgggattgctgcattgcggcaggctgattcggatgtggaacggatgaaacagatttatgatgagcgtcgccggtacatgattactcgtcttcgggaaatggggtttgagattaaagtagaacctcaaggagcattttacatttttgccaacgcacacaaatttactaccgactcttatcgctttgcattcgatgtactcgaacatgcgcatgtcggcattactcccggggtggactttggtacgggaggtgaaggatatgtacgcttctcctatgcaaactcattggagaatatcaaagaaggactggaccgtatcaatcgctacctttctcgtctcggcttctgattagctcggtggctgcttcgtattcttcctctgtcacgaggacggatacggaaggagcgatatagggtgctaatgtccccataattccatctttgattacacaacggatattattgctttctaataaccctttaatgatctcggcttcccagggggatccggagaatacttctattgccttgctataatcttcttctttcatgatcttacttattaggggttgttatctacaaatataacaaaaaagagagagaaatggttatttattttcttaaaaattattcgagtgtgatatgttttacgctaatctgctgtttcaggaaagtagaggccgattctgaaaacttttcttccgcttcggtcgtgtaaaactggcagttgccattcttggtacatttggcatccatttcgggatgtcttttcagatagtctttcaggctttctgcaacatactctccttgtgcaattacactgatatgatccgggatgtattgccggattttaggtaggagtatagggaaatgggtacatccgaggatgacagtatctatttgaggatcctttgacagtaattggtcgatgtacttccggataaaatagtctgctccttcgtcttgtgattcgttattctcaactaaggatacccacatcggacatgctgtcccgctaacctgaatttcaggaaatagtttatgtatttctaatggatacgattcggatttgatggtgcctgctgttgccagtacgccgatatgctgattcttgctaatctctccaacacattctacagtggggcggatgactccgagcacacggcgggcaggatcgatttggggtaaatcattcatctgaatgctgcgcaaggctttggcggaagcagtattgcaagctaatataaccagatggcatcccatatcaaacagtttgttgacggcttgccgggtaaattcgtatacgacttcgaaagaacgtgtcccatagggggcacgtgcattatctcccaaatagatataatcatattccggtaatacttctctaatcttgtctaagatggtcagacctccgtatccggagtcgaatactccgataggtccgggcgtatgggatagatgttgcttcatgacacacttgatttatatacgcaaatgtacaccaaaaaaagggaaagagaaagaagatgatccttctttctctttcccttttggtatttctttattcttggtcagctcttatttgataccaagatttgcttttaccttgctagtcaagttgatgctctgtgattcgtttacataaggaatcgaagttcttgccaggtcgaagatatagatcacaccttcagcagcacctactgctttgatagcattgtccaacttctggtagataggagccatggcatcattttgtgctttcgccatttgctgttgagcatcttgttggaattgctcttgtctttgcatcatatcttgcaattctttttgtcttctttcagcgatgttaggaggaagagaatccttagcgatagcttgttggaattcctgatatttcttgttgaattcttcctgcgttctctgtagttcggcagtaagttgtttttctaaagtctgaatatcattttgagctttggtgaattccggcatcacagtgatgatttcctgtgcattaatgtggccgaatttcaggttctgtgcaaatacacccattgggagtgcaagcaacattacaagtgcaattttttttagcatagttctataatttatttgaatgatttttagttatttccagctgcaaatgtatgaaattaatttgaatatcctaattttcttaggatttcatcactaatatctatgcgtggatttgcaaatattatacctgtagcagaggctctgtcaattaccatatcatatccatgttgctgtgatatagctttcactgcttcataaatatcatcctgaatcggagtaatcaacttgtctctcatcttggctaattcgccttccggaccgaagtagttacgcttcagctcggctgcttctttttccttcgctacgattgcatcttctgtctttgttttttgtgcggcagaaagagtggaagattttgcctggtaatcctggaacatcttctgtgcttctttagccagagcttctacttcactctggtatttcttcgtagcttcttgcatttgctcattagcgctttgagctgccggaatattcttcataatatattccgtatcgatcagtgcaaatttctgtgcatttgctgccatgctgacagcaaatagcatcatgattaatagaacagactttctcataacgtttagtttttgatgatacattagaattcttgtcctaagataaagtggaactggcttcctccatattgtttagaaccaaatactttgtcgaaaccgtaaccccagtcaatacccatcataccaatcatcggaaggaagatacgaacaccgacaccggcagaacgtttcaactcgaatggattgaatttcttgatatcatgccatgcgttacctgcttcaaggaaacctaacacataaatgttagtacttgtttccagcatcaacggatatctcaattcgataccgagacgtgcataggcataaccttcagaaccgtatggtgttaatgagctgttttcgtaaccacgcaaagcgatactttcagttgcataagttgaataaccggtcataccgtcaccacctacgtcgaatgtaccgaacggagatttcttgtattggttatagtgacctaacagaccgaattccgtacgtgtcattaataccagacatttaggatgagcaaccggatccatcagcggagtatatgttttgcctttgaatttccatttgtggtattctatccatttatgaagtttattcatgttgtcctgggtaatgctacctgtttcagggttgctgtaatatcccttatagtctttaccgtccatcaacgagtaaggcggtgtgaactgaactgacagtgagaaatctgaacccgaacgagggaagattgggttgtcaatagagttacgagccaaagtcaatgaaatgctaaggtcattacatttaccgttggtgaccgggaagtattgccagtcgctcaagttataacgttggtaagctaattctgcagaaagagtgaaatagtcatccggccatttcagacgtttaccccaacctacggaaagtccccacatcttgatagacttatcagggtcataatagttttcgtagttgttatagttaccatagttgtacataccataaccaccgtagccactatacatactgttgtagtagttgttgaagtagctggagttgtagtaacggctactgatatctgtctgtacagagaagaatgccgatacagagaatgaattcggacgtttaccgccaaaccatggatcgaagaatgaaatactgtatgattggtagtatttagcgttcgtctgtccgctgatagtcaatgtctgaccatcaccttgaggaagtataccacggtagttttcacccgggtgcaacaagttggctacagagaagttggtaaacttcaagctcaacttaccgataatacccgtctgtccccaacctgcagagaattccacctggtcgttagctttggaagtcaaaggcaaacctatgtcaacagttccgttcatcggatccggttgaatatctggttgcagtttttccgggtcaaagtgtcccatctgctgaatttcacgcaaagaacgcatcaagtcttctttgctgaacaattgtcccggacgaatacgaagttcacggcgaacgacgttttcatacaaacggtcattaccactgatcttgatcttattgatagtagcctgacggccttcatagattctcatttcgaggtcgatagagtcgccaacgatatttacttctaccgggtcgaggttatagaacaggtaaccgttgttgtaatataagttaccgatagcgtcatcatctgtagaaacacgttcgttcaataacttctggttgtatacgtcacctttcttcatgcggagcaggaagttcaactgttctgacggatagagagtgttacctacccatgtaacgttacgcagataatatttttgtccctcgtctatattcaaataaacgtttacagtcttttcgtcatactgtgaaacgctgtcttttacaatcattgcatcacggtatcccaactcattatatttgtcgataatcagttgcttgtctgcctcgaagttctccggcacgaatttcttggtgcggaacaggttacgaagtttacctttctcattggttttcttcataactttcttcagcttggaagtcttgatcgcatgattaccaacgatttggatttcgtgtactttgattttttctttcttgtcgatatcaatgtcgacgatcacctgattttcgctggatggatcgtctttctgcgagatgattacttctgcatttttgaatcccttatcgtcgaagtaacgtttgattaatgtcttggcacggtctacggtattcggagtaatctgcataccttttaccattcccagcttgctttcaagatcggtacgttccgacttcttcacaccatgatagcgtacatctgcgatacgcgggcgttgtgtcagactgatttttaaccagattttgtcaccttcaattttctcggctgtgatttgtacatttgagaacaagccatgacgccaataacgtttgattgctccagtaatttcgtcacccggcacagtaattgtctgtcctaccgatagtccggatagtccaatcaatacatagtcttcataattctttacgccttcgactttaatatctgctatctcatactttttgggtgttccggagtataagatgacaggtttcgagtcttcatcagtgttagcattttgcgcaatgcctgttgtcgcaaagcagcacaggcagacaaacgttatgaatataaaggaaatacgataatgcatttatgttataatttgatgtttcgagttatattagctgatctgttcactggttttgccgaatcggcgttccctttgttgatattcccaaatggccttgtagagttcttctttatcgaagtcgggccaaaaggtgtcacaaaaataaagctccgaataagcgcattgccatagaaggtaattgcttagccggatttctcctcccgtgcggatcagtagatccggatcgggcataaatttagtatccagatgagatgagatacattcatccgttatctgttcgggagacatttctcctgcttttatcagtgttgctatttgccgtacagcttcggttatttcccaacgggatgagtaactaagagctagtaccatatacattccactattcttggatgtgcgttttatacatgatgtcaaacttttctgaacttcaacaggcaacttcttgaaatcaccgattacgttgaagcgaatattgttcttcatcagtgtctcttcttcaatagattctagcaatagattcatcaaagccgctatctcgtcttgcggccgattccagttctcggttgagaaggtataaagtgtcaggtacttaatccccagtctggcagcatcttcagtaatcttctgtaccgtttctgcgccagcacggtgaccgtaagtacgttcttcccctcgttgttttgcccatcgtccgttcccatccataatgatggctacgtgttgtggtatccgagttttgtctatttgttctatataggacatcttcttattttaaacgtatacgtttttatttcccggcatgttccggatctttatcaaaccatagctgattcaagcgaccacgccatacttctgaattatgactatatgggcgttttactgtggtagtagctcgtgagctgtcttctttttctacttcttcatcaaagctaacattgtcgtctttgccgaatatgaatactaaataattattggctctgttctgggcatctttttctgtgtccactaccatggaaaagttctttctgcctctaaattcggggaacttaataggatcatatccagtgttctctttagaccaattttgatgagggaatgagaactttttattagctttttcccaatcacgtcctgacggtgaagtatagaatgcttcaaatccgtctccaaatagataaaattgagaattataatgaataataatagggttttttagttccgggcaatatctataggttgaaccggcagggagatctccccatccgcttactataatattttctttaataggggtatcattgtcgtccaaaactggctctctgttctcattcaatttgttgacctcttgagattcttcagaatacatccatgcgacagctatcgcaatgtcagtgccatcatttgaaagagtggtagatttttccgcttcaccaattaatagcacaccttgagttccattcctattctcataattggtatatgaggtgattttacttggaaatttttttctggtttctccatcaagatattttttgttgttgtcatatagagcgtattcctcatttactccatcagtactggttgtgaaaatatacttattatcattaacttttttgatataactaatccttgtattcttttcagagtcaaaattctctttgataggcgctaagaacagttcaatattggttaaagaagttagcgcactccaattaataccatcttctgatgtataggcgtatacagtattgttattatctttaaacgttgcatacaacatatctttgaattcgatgatagaggtgggtaatgtttttatagaattctctattcctactatcgaattaggagaccaattgtttaaaccactaactgtgttcttgtatactttaagtcctgatgtcgtttctgtatatgttaagacattagaccctaaaataatggatctttgaagaccaattatattattgtcgccagctccttctatatactcccatctcaacgaatccggatcatgctgatgcacatttaccttaatagtatattccttagtttgattaggagatattcccgctaaggcttctgtcgaccatacctttatcttaagtggattccgaagatcgatcgaatcattgatgtttaagacggaatcgtttccgcttttgtccttcattgtaacgacgcctgatgccgttgttaatgttttgattaaaatcttgtcaatgatggtatcggcatgaacaggaagagagtcttcgttatagatttcacatgataattggtcaattgtgaatttataactcccaaggcctgctgtgtcaagtgcaaacgcatgtatagttgcatccgggctatattcgatgttattatcgtcatcaagacatgacgttataacaaatgacaccatgaaaaaactcgcaatgaatgataaaaactttattttcatttgaaagattgtgtttatttacaagttgcaaaaatagaaacattttttccgataatgaacattacaggtaagttttatataaaattatagataataacactgtttttatcgacgtaaaaccccctgaatagaactatcttagctataatcgacgaacataatgccaaatttgtctttcgaagtgttcttctatcgaataactaaaattatcgtccatttgaggtgctttaacaccggagtgtaaccggccggggcacttttcgatataggcttcatcccatagctcattatcaatgaatgattgcagcaattgcctgcctccttccaccaataatgattgtatttttcgttgatacaatgcttccatgatctgtttcaatgggttatggttaaagttgatggtgatatatgtgatgttctttttttctggctgttgcttttcagtaaagattaatgtaggcacgttgccatcgaatatttgtgaatcattaggtagggatagcgtgcgatctaacacaacgcgtatcgggttgtgcccataccagttgcgtaccgtaagtgacggattatccaataaggcagttcgcctgcctaccataatcgcatccgcctccgctctttttttatgcactagcatggaagtaagaggagaggagaggcttaccggttttccgtctgtacgttctatatcaataaagtgatcggctgattctgcccatttcagtgtaatgaaaggacggtgaagcgtattaaaagtgataaaacggcgaatcagcgatttacattcttcctctaatacaccgactgtcacttctcgtccggcatcccgtaatttctgaattccccgtccggccacttctgaaaaagggtcttgacaaccgataacaatgcgtggtatctgcttctctataataagatcggcacaaggaggcgttttcccatagtgggaacaaggctccagactgacataaatcgtagaacgtttcaataatgactcatctttgacagaatggatcgcattaacctccgcatgcgcctcgccacagcgaatgtggtaaccttcgccgataattcgcccgtcacatacgataacggcccctaccatcgggtttggagatacgttgcataacccattctttgcaagctcaatgcaacgtctcatgtatttttcttcttccattttggtgctcttcgccatattattcttacttttgcactccgaaattgtgaaaatatgaatcgtatcaccgcttacattcgccaatctttgcaggaaatctatccaccggaggaggtaaaagccctttcgatgctgatttgttgcgacatgttaggtttagatgcgctcgatatttacatgggcaaagatataattttatccgaatgcaaacagcgtgaattagaaaacattatattccgtttacagaaaaatgaacctatacagtacattcgtggtgttgcggagttttgtggaaggaattttaaggttgcttccggcgtgctgattccccggccggagaccgcggagcttgtagaactaatagtagaggagaatccgaatgctcgtcgtctattagatataggtacgggaagcggatgcattgcgatctctttggataaaaaacttccggatgcagaagtagaagcttgggatatttcggaagaagcattggctattgctcgtaaaaacaatgacgccttggaagctcgggtgagatttctacaaagagatgttctggccgatgactgggaaaagataccgtctttcgatgttattgtcagcaatccgccttatgtgaccgaaacggaaaagaacgaaatggacgctaatgtccttgattgggaaccggggctggccctgtttgttcctgacgaggatcctttacggttttataatcgtatagcccgtctgggaagtgaattgctcttgccgggtgggaaactttattttgaaatcaaccaggcctatggccgggaaacagcacacatacttgaaatgaaccaatatcgtgatgttcgtgttataaaagacatatttggaaaagatagaatagttacagctaaccgatgagtgcacaattaactgatgaagaggctttgaatcgcgtagcctcttactgctccactgccgagcattgccgggcagaaataaatgagaagttacaacgttggggaattgcctatgataccattgcgcgtattcttgaccgactggaatcagagaagtttatcgatgatgaacgtttctgcagagcttttgtgaatgacaagttccgctttgccaagtgggggaaaatgaaaatagcccaagggctttatatgaagaagatcccatctgatgtggcatggcgttatctgaacgaaattgatgaagaagaatacctttctattctgcgtgacctgctggcttccaaacggaaaagtatccatgcagcagacgattatgaattgaatggaaagctgatgcgattcgctatgagtcgtggttttgaactgaaagatattaagcgttgtatcgacattcccgatgaagaggaacaaattgactgaaaaaataaacggattcttctttttattctcgttcaatttctgtacttttgcggcaaataattaatagttagtttagttatgaaaaacttagagagactatttgcggagaaactgttgaagattaaagctattaaacttcaacccgctaacccttttacatgggcttctggatggaaatcccccttttactgtgacaaccgtaaaactctgtcctatccttctcttcgtaattttgtgaagattgaaattacacgtctgatattggaacgattcggacaggtggatgcgattgctggtgtggctacaggtgctatcccgcagggagctttagtggctgatgcattgaatctgccgttcgtgtatgttcgttctacccccaaagatcatggattggagaacctgattgaaggtgaacttcgtccgggtatgaaagtcgtagtcgtagaggatttgatttctacaggtggtagtagtttgaaggctgttgaagcaattcgtcgcgatggttgcgaagtaatcggtatggttgcagcttatacgtatggattcccggtagcagaagaggcattcaaaaatgcgaaggtgactttggtaacgttgaccaattatgaagcagtgcttgatgttgctcttcgtacaggttatattgaaaaagaagacatacagacattgaacgaatggcgtaaagaccctgctcattgggatgctggaaaataagattcattttttgatcaaacatatttggtaaaaagaactgttcggacaatatttggccggattgttctttttttgttttatactaatagaagtttatgagtaattttgagagtagtgtcaaggtaataccttacagccaggagcgcgtatataataaactttcggatttaagtaatctggaagcagtcaaagaccgtttgccaaaagataaggtgcaggatttgagttttgattcggacacgttgagttttagtgtttcccctattggacaattgactttgcaaattgtagagcgcgatccttgtaaatgtataaagttggcaacaactaactctcctcttccttttaatatgtggattcaactggttgaaactgcagaagaagagtgtaaagtgaaggtaactatcggaatggatcttaatccatttatgaaagcaatggtgcagaagcctctccaggaaggtttggagaagatggttgatatgctggcagttattgaatattaaacttttttttatggcacagaaactttgggagaagtccgtacaggtaaataaggatatcgaacgtttcacggtaggtcgtgatcgtgagatggatctttatttagccaagcatgatgtgcttggttctatggctcatattacgatgcttgaaagcattgggttgttgacaaaagaagaactggaccagttgctggtggaattgaagagtatttatgcctcggccgaaaaaggtgaatttgtgatagaagacggggtggaagatgtacattcgcaggtagaattgatgttgacccgtcgtttgggtgatatcggaaagaaaatacatagtggccgttccagaaatgatcaggttctgttggacttgaaactttttacccgtacgcaaataaaagaggttgccgaagcggtagaacaactatttcatgtcttgatccgtcagagcgaacgatataaaaacgttttgatgccggggtatacacacctgcagattgcaatgccttcttcttttggcttgtggtttggtgcctacgccgagagtcttatggacgatatgctgtttttgcaggcagcatttaaaatgtgtaatcgtaatccgttaggttcagcagccggatatggttcgtcttttcctttgaaccgtaccatgacgactgacttattaggttttgattcaatgaattacaatgttgtatatgctcaaatggggcgtggaaagatggaacgcaatgttgcttttgcattggctacgattgccgggacgatttccaaattagcttttgacgcctgtatgtttaacagtcaaaacttcggtttcgttaagttgcctgatgactgtaccacggggtccagcattatgcctcataagaagaatcccgatgtctttgaactgacacgtgctaaatgtaataaactgcaatcgcttccccaacagatcatgatgattgcgaataatttgccttctggctatttccgtgatttgcagattatcaaagaagttttccttcctgcttttcaggaactgaaagactgtttgcagatgacaacctatatcatgaatgaaataaaggtaaatgaacatattcttgatgatgacaaatacctccttatttttagcgtggaagaggtaaatcgtttggcacgtgaaggtatgcctttccgtgatgcatataagaaggttggtttggatattgaagcaggtaaattctcgcatactaaagaagtacaccatactcatgaaggtagtatcggcaacctctgtaatgcagaaatctccgcattgatgcagcaagtgattgatggattcaacttttgtggaatggagaaagcggagaaagcactgcttggaagataaaatagactttcggaggatagttttttaaactttcctccgaaaagatttggcagaaacaagtaaactacttatctttgcacccgttgaaaaaacgcggaaatagctcagttggtagagcataaccttgccaaggttagggtcgcgagttcgagtctcgttttccgctctttctttgaaaggatgctcgaatggtggaatggtagacacgaaggacttaaaatcctttggccattgcggctgtgcgggttcaagtcccgcttcgagtacgagtattctttataaggcttcatgaatcattgattcatgaagccttttttgtttttatgggtgtataatatacattttatttattttctggaaagctctatatgatagctgcttggaagaaataaaccaaaaaagagttataatatttttttattgtgttattaatcttttattttgcttttagattatgatttaatgtataatattatattgaatcattccttagacctaaatatatgtaatatttgatttaaccgctaacactgaaaaatactagagagatggagaataatgacaggcagattgaattaaagtttcagaggtttttcactgtaaattttccaaaggtaaagaactttgctcaaatgctgctaaaatcggaagcggatgcagaagatgtggctcaagatgttttctgtaagctctggttgcagcctgagttgtggctggataatgataaagaactagacaattatatttttataatgactagaaatatagttctgaatatctttaaacatcaacaagtagaacaggaatatcagtcggaagttatagagaagactcttctttatgaattaacagaaaaggaagagatcttgaataacgtatattataaggagatgttgatgattattcaactcaccctggagaaaatgccgaagcgtcggaggttgatattcgaacttagtcgtttcaggggattaagtcataaagaaatagctgataaactcgatgtttctatccgaacaatagagcatcaggtttatttggcattgatcgaattaaagaaggtactcctcttttttattttttttctctaatatttttaagtagtatgtatgtagtagttgtatttagtgtataaagcccaaaaaagaaagaaaaagattcatgaaaaattatattcaacaactcgtagaattattcggccataatagctattcagccggaacacagaagaaagtgcaacagtggttggctgatgaggagcatgttgatgaaaagagtgaggctcttcgtgagctttggaaacaagcaggagaacagaaagtgcctgatggcatgcaacaatcaatacaacgaatgcggcagaatctgggaatgcagtctatcacttcacgtagaaattaccagttgcttatatggagagctgcagctattttcttgttagcagtctcatccgtttctatttatttgatgttggaaaaggaacggccggaaaaagatttagttgaatgctatataccgacagcggaaattcgtgaacttacattaccggatggtacaaatgtcatgctgaattcgaagagtatactactatatccggaaaaatttacaggagagactagaagtgtatatttgattggtgaggccaactttaaagtgaaaccggataagaagcatcctttcattgtaaaggccaatgattatcaagttactgctttaggtactgaatttaatgtaaatgcttatccggaaaatagcgaactgatggctactttgctggaaggtagtgtgaaagttgaattcaataacttgctgtccaatattattttaaagcctaatgaacagttggtatatgacaaacatacgaaagcgcacaatctgcggatgcctgagatagatgatgtgacggcatggcaacgtggggaattggtttttagtaatatgtatctggaggatatttttacaagtcttgaacgcaaatttccttatgcttttgtatatagccttcatagcttgaaaaagaatacatatagtttccgcttctccaaacaggcgaatctggaggaagttatgaagattatatcgcaagttgtaggaaatgtaaactatgttatcaagggaaataagtgctatgtaactagtaaagaataaatatattgtagaaccttttaaatttaatacgtaatgcaaaaaaatacccggaaggaatggccgttcctcccggatatgaaatcaatctcttttaatattagcgtaatattgacgctattctgaatgatcctagaataataaccaattaactaatactaaagatgctacaaatctacgaaaaaatagcagaaaaaatagctcataagcgggtctttctcacttttttaagtcttattcttatacagactttcgctttggctcaaaatgatagtaaaataactatccagcagaagaacatcactgtcattgatgccttaaaaactgtggaaaaacagtccaaaaagtctataaattatagtgattccgaattaaaaggaaaagtaatagcccagttaaacttgcagaatgcatccctcgagaccgcacttgataccatcttaaaagggacgggcttttcattccagattcaaggtaactacatcataatagctgaaaagaagcctgtagttgcacaaacccttaaaaatatcaaaggaaaggttactgatgaaagcggtgaaccgttgattggagtaaatatatctgtggatggtagttctacaggtacgattaccgatttcgatggtaactttacgatcaaggcggcagagaaatctattctcaaagtatcttatatcggatatgctgcacagataattcctgtttccaagaaagatttctatccggttgtaatgaagcaggatacagaagtgctcgatgaagttgttgtgacggcattgggtatcaaacgtgcagaaaaggcgttgtcttacaatgtacaacaagtcaagggagatgctctgactacggtaaaagatgctaacttcgtaaactcgctgaacggtaagatagccggagtgagtattaacaaaagtgctagtggagttggtggtgcgacacgtgttgtaatgcgtggtgcaaaatctattgaaggtgataacaatgctttgtatgtggtggacggtattcctttgttcaataccaatatgggaaataccgacagtggtattatgggtgaaggtaaggccggaacagaaggaatcgccgacttcaatcccgaagatattgaaagtctttctgttttgagtggtccttcggctgctgcgttgtatggtagtagtgccgctaacggtgtaattttgattaccactaaaaaaggaaaagaaggaaaactttcagtgcagttctcttcttcttcagagttcagcaaagcttatatgactcctgagtttcaaaatacgtatggtaacaaaaaagatatgtatgaaagctggggtgagaaactgttgactcctacaagttatgatcccaagaaggatttctttaataccggaacaaactttattaattcggttacgttgaccaccggtacgaaatcgaatcagacttttgcttctgtttcttctaccaattccaaaggtattgtgcctaataatgaatatgatcgtttgaatttcacaatccgtaatacggcaactttccttaatgataaattacaactcgatttaggtgcgtcgtatgtgaaacagaaagacaagaatatggtatcgcaaggacaatattggaatccggtgatggccgcctatttgttccctcgtggtgaagactttgatggaattaagtcattcgaacatttcgatgaaagtcgccaacttccggttcagtattggccggtggcagatccggtatatgcttcacagaacccttactggactgcttatcgcaatgtagctacgaatgaaaagagtcgttatatgttcaacgtagggttgacttataatattaccgattggttgaatgcgacagcccgtttcagaatggatgacacacatgtattgtttgaacgcaagatttacgcttcatccgacgataaatttgcggaaggaaagaaaggactgtatggatacaataactatgaagaccgtcaggaatatgccgactttatgttgaacgtaaataaacatatagctgatttcagtatttctgccaatgcgggttggaactattctaactattgggcattggagagaggatacaaagggacattattgggagtgcccaataaatttgcggcttctaatatcgatccggctaatggtcgtatctcagaaaagggtggtgatagtcgtgtacgtaatcatgctgtttttgccaatttggaacttggttggaagagtatgctttatttgacgctgaccggacgtaatgactggaattcacgtttggtgaataccgatgaagaatctttcttctatccctcaatcggtctgtccgggattatttccgagatggtcaaattgcccgaatttatctcttacctgaaagttcgcggttcgtatacggaagtcggtgcgcctgtatcccgttcgggactgactccgggtacggtaactacccctattgtgggtggtgcattagatcctaccggtatctatccgtttactgatttcaaggcagagcgtacaaagtcatacgaatttggattaagtctgaagttgtggaataaattaagtgcggaggtaacctactatcattctaatacatacaatcagaccttcttgggtgatcttccggaatataccggatacaagcagatttatttgcaggccggtaatgtggaaaatcgtggttgggaggcttcattaagctattccgatcagtttaagttcggattaggaatctcttcaacattgacattctctcgaaatataaacgagattaaggagatggttgaaaactatcatacggatttgatggatgaaccgattaatattccggaggttttgaaggatggtggtcgtgtcatcttgaaagaaggcggaagtatccacgatatttatgccaacaccttcttgaagaaagaccaccagggatatgttgaggtaaagagcgacggaacctttggaatggaaaagggggaacctgtttatttgggaaaaacttctcctgactttaatctgggatggagtaatatgttgacatacaaaggctttggactcggattccaaatcaacgggcgttttggtggtgtggtgacctcttctacagaggcattgcttgatcgttacggtgtgtccaaacgttcggctgaggctcgtgaagcgggaggcgtattgttgaagggacaaggtctggtagatgcgaagtcttattatcagatgacaggtacgggaaattatgaaacttccggttactatgtatacagtgccaccaatattcgtttgcaagaacttacctttagctatactatgcctaataagtggtttggtaacgtgttgaaagatgttacagtttcgtttatagccaacaatccttggatgttgtattgcgaagctccgttcgatccggaactgactccttccactagtacttacggacaaggtaatgattattttatgcaaccgagtgttcgtagctttggcttcggtattaaatttaaattataatacaccttctttattatgagaaaaatgaatcattttaaactattagcggtgatatgcgcaatggcgctatttgcctcatgcaattttgaagaaatcaataccaaccaatttgagatgagcgacggagaaggtgcgatggatggttttgaagtcggagggctgattacagctatgcaacggacagtgattcccgtaggcacacaggctgatgatacagatgttatcaatgaatatcaaatagcttatcatctgtcggccgataattggagtggattttttggcgagaacaacagtaacggttggaacgcaggtagtaacaatactacttattatttgttggacaattggataaaagcgacctatacacagtcttataccaatgctcttgatccttggaagaaattgaaaatagcgtccgagaaaaatggtacgcccgaagtctttgctttggctcaaattctgaagatttccgcttggcacaagacacttgaaagtttcggtccgatgccttattctcatgcggcggacgctacaatgaacattccgttcgattcggagaaagaggtgtatacggcgatgtttgaagaattgaccgcagccattgaagaattaacggaaaaggcggaaaatggggtgaatgtaatgggcgcttatgatgcggtatatgccggagatgctaccaaatgggtgaaatacggcaattcgctgatgcttcgtttggctatgcgtgtccgcttcgctgatgcggaactggcgaaaaagtatgctactcaagcagtgaatcattctattggcgtgatgacggctaaggatgatgcggctcaaatgagtcaaggagcgggtatgactttccgcaacaacattgaatggttggcaggcaactataatgaagctcgtatgggttcttccatcttttcttatctgatgggatatgaagacccgcgtttgagcgtttattttttgccgatggatggtaatgcctcttatggtgttgaggctttcgacggaaaaacgtatcaagcggtgccggcagggcatgccaatgcgcagaatgacatctacaaatcttgctcaaagcccaatattcaaagtggaactcctacatattggctgcgtgcatcggaagtttattttttgcgtgcggaagcagctttagtgtgggaaggtttcggcagtgcggattcatggtataaacagggcattgatatgtcttttcaggagaatggtgtgaccgaacctgtagacgattatatgaattccaatttgtcacctcgggcatatgttctttcccattatcagtatgagcaaacactttctgctccgtgtgagactactgtcaagtttgaagggacaactgagcagaagttggaaaaaattatgattcagaagtggattgctttgtttcctaacggacaggaagcgtggacggaatggagaagaaccggttatccgaagttgaatgtcattaagactttgaaaggagcagtgcaaggcgcaactcttgagggcggtattcgccgtatgatttatcccaccagtttttctcagactaacgagggaaaggctatttatgaagcagccttgaagttgttcaataacggtgcaggtggcgaagataagtcttctacccgtttgtggtgggattgtaagagataacctacatgtatcattttaatacagatgaagaatatgaaatcattaagaaaattgttatatattattccattgacaggcatgatggtaacttcttgcatggatgtggagaatattgagatagaccatataggcgggtatgccacaatgaacaatgcggagagtgaggcatattatgccaatctgcgcgcctataaggcgactgcttggaattacaatcgtcccgtagctttcggatggtattccaattgggcgcctgctggagcttatcgaagaggatatctctctgctatgcccgatagtatggattttgtttctatgtggagtggcgctccaggacgttatgaaatcactccggagcagaaggcagataaagagtttgtgcaaaaggtgaaaggaacgaaactgttgcaggtaagtctgctttcttatcttggtaagggcgcgacaccaaattcggtatacctcgaagtggaaaaacaagcggaggaagaaggctggtcggcggctcaattggaaacggcgaagaaacaagcccgttggaaatattggggatttgaaggtcagtttgaaagtgaaaaccattatgcatgtctggcgaagtttgccaaagctctgtgtgattctttgtatgcaaacgaatgggacggttatgatgtagactgggaaatcggtagtggtgtgtttgatatggatggcacattgagtcagaataagcatttgattcatttggttaaagagatgaacaattacattggtccgaaaagcgatccggaaggtaaaggacataaaatgatctgtattgatggaaatatttatgggcttacccatgaattggatgagtatgtcgattattggattatacaaagttatggtagttccaatcccggttttgatggttatggcgttgatcctaaaaaaataatctgcacagagaactttgaaaagtatgccactaatggaggtcaattgctgaagcaggctgctgctatgccgcaagaaggttataaaggtggagtaggagcttatcgcttcgataatgattatgacaatacgccaaattataaatggatgcgtcaggctattcaaatcaatcagcgggttttcaatgaatggaaagcgaaacaaaacgaagcggaaaataaaccgcagaaataagtggacttataaaattctaaaacagtaaaaagatgatgaataaacatatattctattatttgatggtaggtagtatggcgttattgttgggcgcttgcaacgacagcatgaatgacctgctggagcctaaggtttatttcgaaagcaaggaatataatttctcggtggaagatgaaatggatgtaatgacatttgatctggtttcaagactctcgtcagcaacttcctctcaggtagacgtatcatatagtgtagccgaaccaagtgtagtagacgaatacaatgcaaagtatggcacaaattatgagatgcttgatgtttcgcaggtaaagctaagcagtacgacatcttctatttcgagtggaaaattgtatgcggataatgtagaagtcgaactttccgggttagaagccttgaaagccgggaactcatatgttttgcctatgcgggtgcattcgtcttcggtgtcgactctttccggaacaaacattgcatatttctttttctccaaaccgttgaaaattaccaaagctggtaacttcagtaatcactatatttctgtgaagttccctgtcggtactttcttctcgtcattcacttacgaagcattgattaatgtggattatttcctcgataataatacgattatgggaaccgaaggtgtgatgatcctccgtatcggtgatgcgggaggaggaattactcctaaagattatttggaagtggccggaagacagaactaccgtgtaacgaaaccgttgttaacaaatcgttggtatcatgtagcgttgacttatgatcaaccgacaggaaaaacaggcatttatgtaaatggtgagaaatgggctggttcagattgggggattgacggttttgatccgaattcggatatgggtttttatattggtagaatctatggtttcaaatggggtgaacgtccattccatggtaaaatgagtgaagtccgtgtttggagtgtagcccgtacggaaaatcaacttaagcagaatatgctgggtgttgaccctgcttcagaaggcttggcactttattataaactagacggatcggagactcaggaaggtggagttatcaaagatgccacagggcgtataaacggtactacaaatggaattactattaagacgttggatgctccgatagctatcaattaatggaacacacaaatttgtgagagattttgctctttgcatttttgaatatgagtgaaagcctgcttactgaaaagataatattctttgggtaagcaggtttcttttatttatgtttgttttatgaagaagttactatttaccctgtttatatcttttccatctaaatgtttttgccagtacctcagaaggaagattaatgctgacgtgcaaattataatcaaggcatttcttttcttctttataaggaaaaggtattttagctaaatttaaattttctctaaaaagtttcctttttatgagtaaaatgtatttctttgcagcgtttaatacttatggatatactggaatggctcaaatcaatttcaactcgatatatactgcttattataggaaagccttcctatttaccttgtcctatgtccataatgatttagtagcagaagatattgtatcagaagccattatccatttatgggaactaagtaaagaacgggaaatcccaagtgttgaagcgattttgattacttatattcgcagcaaatcactcaattacctgaaacatatacaagcacaagagaatgtttttcaaactttgcttgataagggacagcgtgaattggaaattcgtatatcaacattggaagcatgtgacccgaaggaaatattatcagaagaattacgggcaaaagtgcatgcattactagagagtatgccggaaaaaactcgtattgctttcatccacgatcgcctagatggaaaatcccataaagaaatagccgaagaactgggcattagtgtaaaaggagtagaatatcatatcagcagagcagttaaaatgctgcgtgataatctaaaagattatgctccattccttttctttttcatctgaaaagaaggaaaaggcctccttgtttgctatttttttaagcactaacaaaaaaatcacatttcttactagggaatctctttagtgagtggtattcttaatgaaagggggaataatacccctattctcataacttataaattatttattgtatggataaggaattactattaaaatatattgcaggcaaggcatcccaaaaggaaaaggaagacgttgctacatggattgatgcagatgcagccaatcttaaagaattcatttctcttcgtaagagttatgatgcattcatatggcaagacacagacgcattctcaaagaagacaaaaaagacaatttcattgcatcctgttacacaacgaatcttgcggattgcggcagtatttgttgtagctttcggattaagttatgcaatgatacaggttctccaaaaagaggatatagaaatgcagactgtttacgttcctgccggacaacgcacattggtgacacttgctgacggaactacagtatgggtgaatgggaaaagtacattaacttttccgaattgtttttcttcccgtacacgtaaggtggaacttgacggagaagcctattttgatgttcggaaagatccggaaaaacagtttatagtctctacggctcaccagtctgccataaaagttctgggcacaaagttcaatgtaaaggcatacaaagaagccgatgaggtaattactacattagttgaaggaaaagttaattttgaatttaacaacgctagtcagcaaccgcagtatattgtgatggctccgggacagaagctggtctattatttccaggatggaaagactgaactctatacaacttccggtgaaagggagctttcatggaaagatggcaaaatcattttccggcagacctccctacgggatgcactggatatcttagcggatagatacaatgctgaatttgtcgttcgggagaatgttcctcatgacgactcattctccggtacatttaccaaccggaatctagaacagatactcaattttatcagtgtctcttcaaaagtacgttggcgttatctgaacaataatggaactgccggtaaagaaaagataaaaatagagatatttatttagtattggaaaatataaaaccttaaaaaacaaaacttattgccatgaaaaacaaagatccttaaagacaaaaatacgggacgatattggccgtatcttcccgtatgagcctcagtaattgtgaactacttgtttgcagacaagtataactaccaattttctaattaaactcgttacaaatctatgcaaaattattgtatcgtccaatttcttggaggattaaagtcgcttagacgaaccttaaaagaaatatcattggctatgaaattactattaatgctgctcgtttgttctgttgggctgacttatgcgtctgacggatatgcacaaagaaactctatttcgttgaacgtgaagaacagtactatcgaagaagtgctgcacacgattgaacgtgaatccggattcggcttttttattaacagcaagaatctgaatctcaatcgccggataacggtttccgtatcggataaaaatatttttcaagtactgaagcaagtctttgaaggtaccaatattgaatataaaatactggataatcaaattgtactgacagctaaggaaacggaagttgcccagcaaaaggtacaaaacgttaaaggtacggtagttgataaaaatggagaaccgctaattggcgtttccattgtggagaaaggaactactaacggaacagtgacggatcttgatggaaattatacgttgactgttcagactgccaatccggtgttgttattttcatatgtgggttatcagaaaaaagaactgcctgttgtcggttcggtcttgaatgttactttggaagatgattcgcaagtgttgaacgaagtagtggtcaccgcccttggtattagaaaagaagcgaaagcactttcttataatgtgcaggaagtatctgccagtgaaattgttggtgttaaagatgccaactttgtaaacagcttgtccggtaaaatagccggtgtggttatcaattccagttcatctggtataggtggcggagcaaaggtggtgatgcgtggtgcaaaatctctttccggaaataataatgcattatatgtaattgacggcattccgatgccttcattggaaacgacacagccggatgactttatgactggtatggggcagtccggtgacggtgcttccatgattaatcccgaagatattgaaacgatgtctgtattaagtggtgctgccgcttctgcactttatggaagcgatgcagctaatggggttattatgattaccacgaaaaaaggtacgaaagataaactccgtgtcagttatgctaataacacctcgttcttcaatccgtttgtaactccggagtttcaaaatacttatggtgcaacgacaggtgaactgaaaagttgggggcagaaaatgggacaacccagtaattacgatccgttagatttctatcagacaggatggaatgaaactaactcgttgactatcagtaatggtaatgagaagaaccagacattcctttctatggctgctaccaatgcagcgggcattgttccgaataacacgttggatcgttacaatttcacgatccggaatacaactagtatgctcaatgatcgtttacgccttgacttgagtgctagctatatgaacgtacgcgaacagaatatggtatcacagggtcagtactttaatccgatagttccggtctatctgatgtcaccgagctacagcctggatatgcttcaacagttcgaaatgtataatgagactcgtaacttcaagacacaatattggccgtggggtaatcaagggattgctttgcagaatccctattggattgtcaaccgcgacaattttgtcaatcataagaatcgttttcttataagcgggggcttgaactttgaaatcactaaaggtataacattaggtgcacgtgctaaaatggattatacctcggctctgtttgaaaagaaatattcggcatctaccgataatatcttttgccaggactttggtggttattacaaaggcgatgcctctacccgtcagctttatggtgatgtgatgttgaatatagataaatattttggtgatttctcattaacagctacgctgggaaccagcattcaagatgtcaactaccagtatttcgatgtcggtggtagtttgaactcggtagccaatagctttacaacgcttaatttgatgcagtctaccgtgaagtttcagcaagatggttatcatgaccagacgcagtctatttttgctaccgcacagttaggatggaaaagcaaactttatttggatgtaactgggcgtgtcgactggtcttctgctttggcatggaccgatgcgaagtcagtcgcttatccatcggtaggtctttccgcaattctgactgaactgttgcctatcaagaacgatgtatttactttcttgaaagtgcgtggctcgtatagtgaggtaggaaatgctcctacacgttatattgcttatcagacctatccgtatgagtcggcttctcccacgacagctactacgtatcctaacacagatattaagccggaacgtaccaaggcgtgggaggtcggtttgcagtctcatttttggaacgataaattagagttgaacgtatctttatataagacatccacctacaaccaattgttcaatccttcactcccttcatcttccggttattcttccatttatatcaatggtggacaagtggataacaaaggtattgaagccagtctgacattgaatcagcctctcggaccggtgaaatggaactctacgttcacttacactctcaatcgcaacaaaattaaaaagttgttgaagcccaccactctgtcaggcggagaagttgttagccaggacatgatggatcttggggggcttgaaatcgtgaagtcacgtctttttgagggtggttctatcggtgacttgtatgtgactgctcttcgcacagaccatcacgggtatattgacgtggattatgtcaataatacagtggctatcgacgacaaagccggtgaacgtaaggatggttggatttatgctggtaattctcaagctaaatacatgatgggatggcgtaactccttctcttggaaagggctgacattgagctgtttgattaatgctcgtatcggtggtgtggttgtttcgcagacccaagcattgatggatgcttacggtgtttccaaagctacggctacagcgcgcgatttaggatatgtattgattgacggtcacgaagtgccagccgtgcagaaatattacagtactgtgggaagtggtgtaggctcgatgtatgtctacagtgctacaaatgtccgtcttgcagaattgtctctcggttatgatgttcccgttcaaaagataattccttggattcagagcatgaacgtcgccttcaccggacgcaacttgttcatgttctattgtaaggccccttatgatcctgaactgacggcaagtacaggtacacacttcagcggtatggactattttatgttgccgagcctgcgtaatttaggcttctctgttaaacttaacttctaaagaatcgacaagatgaaacagatatcaaaatatataaaagttgttaatggtacgttgcttgccggaggcttgctgcttacagcctgcaccagccattttgaaagttggaatattaatccgaatgaggtaactccggagcagatggaacgcgataaccttaaaacgggagcttactttacacagatggagaggggcatttttgtggtaggtaaggataaaggcggtttgtttgaggaaactcagatgctgaccggtgacatatttgccagctactttgctcctgtcaagacgtgggattatgccggaacagaagataacgactgttataaactttatcgccaatggtataattcaccgttcaataacgcttataccgaagtgatgcagccgtggcaaagtatcgtagagaataccgatgaggtttcacctgcacgtgctttggctactattgtcaaggtgtttggtatgagtcgtattacggataagtatggtcccattccttattctaagtttggtacaggtattcatgtggcttatgacagccagaaggatgtgtattatcgcttctttgaagaattggcagatgccattgatgtgcttactggttataacagccgaacgtccgaaccgtatatggaacgttatgactatatttataatggtagagtagagaagtggataaagtttgccaatacactccgtctccgtttggcaatgcgtatttcttatgtggatgagacaaaagctcggacagaaatagaggctgcgattggtcacagtataggactgatgacgtctgttgatgataatgcggttttaaaacagtctgcatcgttcactttcatcaatgagtggtgggaagcatttgaaagttttaatgattttcgcatgagtgctactatggattgttatttgaaaggtttgcaagatccgcgtttggcatgttactttaaggctgcggtgaaagatggagcatatcatggagtccggaatggacaaactagccgtaatcaaggaacattgtcggaggctgcttccagtatgaatgtggaacaaaacgataatatagagtggatgggcgccgctgaaacttattttttactggcagaagctaaattgcgtttgaacttgggggataagaccgtgcaggagtattatgaagaaggtgtgagaatttctttctcttccaaaggtgctacgggggcagatacttacctcgcggatgatactaatgtaccggctacgtcttttgtagatccgacaaccgaacgtagtactgatgtaagtagtatggtttcaaacttgactgtgaagtggaacgataatgctactgaaagcaagaaactggagcgtattatggttcagaaatggattgctctttttcctgacgggcaggaggcatggagtgagatgcgtcgtacaggttatccgggaattgttactatcagttcgaatcgttccggtggtgaagtgcctgaaggagaacttattagtcgtctgaagtttccgacaacagagtattcagacaatggcgagaatatgcaagctgctgtctccctattgaagggtacggacattgccggtacacgtctttggtgggatgtaaaaaggtaatcagatatataatgtagaacaatctaactaagtaattagaatatgaaaacaatgaaatacttattggtcgcgctagccacaggcagcttgatggctgcgtgtaacacggacattgaatcgttgaccattcagcgaccgttgacttacgacgaccagtactaccaaaacctgcgcgattacaaagcaagcgaccatgaaattgcttttggatggtttgcgcagtatggagctcaaaactcagcggctgttcgatttatgggattgcccgacagtctcgatatttgttctatgtggggtggtattcctgcaaaggaaaatactgagatatgggacgaaattcgttttgtgcagaaagtgaaaggtaccaaaatgctctgtgtggcaattacacgtattgatgcggaaactgacgaacacgattttaagaaggcttacaatgaagcaaaggcaatgccggagggtgatgaacgaaccgttgcacttaatcgttcctttgaaatgtatgctgaatatttccttgaccaggtgttcctgaatgatcttgacggcttcgatgccgactatgaaccggaaggtgactttttgagtggttcaaattttgagtacttctacaagcatatggctaaatatatgggaccgaatccggatatcactaaagaagagcgtctacaactcattgaagagcgttatggtaaagaaatagcttcgcaagaaggcatttgtgacaaaatgttgaatattgaccagacatctactagtatgacaagtcttgttccatatagtaattattgtttccttcaggcgtatagtggtggaactggcgctggtggatggcctgatgaaaaggtggtatactgctgtaatatgggtgacggctggcagggtgatatgcagtccatgtacaatcaggcacgttataaaccggcgaatggcaaacgcaaaggaggttttggagcattctttatccatcgtgactataatgtacacgaatacaatcctgagccttactatcggttccgtcaatgtatccaaatacagaatccggctgtccattaattaactttttaatgaaagatgactatgaaaaatagaaagaatctgttttatataagtatgttcgccatctgtgtgcttgtttttactgcctgtggcgatgatgagacttacgatgtttatggagatccgtataatagagtgtacgttttggataattccaaggagtataagatagtacagactcccatcagtacagtcagtaatgtagatttcacatgggaagcaaaatgctcaaagaaagcgagtggtgacattagagtaacggtagcggttgataactccttgattgatgcttataatgaagaacatgacaccgagtttgaagccttgcctgttgaggctattgtactggagaataaagaaatgactattcctgcaggagaaatggtagtggcagatgctgtacatctaaaattgactgatgacgtgaatgttctctctactcttaagagtgaaaaaggatatattgttcctttgcgtctagtttcggcagaaggtggtaattcgcagttgagcactaatatgctggcgccttctttcttgactattactgtgactgaggataatatgaatcatgaagctacccaatatacaggtactggtacattagtggcagaccaaacaggatggaccgctaccaccaatggaactgttcagtcttggtatgaaccgattgaagccatttttgatggaaattatgaaacttattgttctatctctaatcggtcgggtgagcttttgctggatattgatatggggaaagcatattcttttgatagtatcaaaatgacaagttccggatatgattatgaaacttggactgaaaaagaggtcggtgcgttcagtgccggtatgactgtcagcacaagtgataatggtacggattggaaaacacaaggagaaattgaacgtaatgccgaagattgtgttttctatgctccgttgactgcccgatatattcggataactgttccgaatgccggtggttggtatggtgcttctttggaatgtggtgtatttaatgtttatgctaaataataattgaagttatgaagaaatatacgctcttatctttattagctttgttgctttgtgtgtcaggttgcaagactgaacctgattacagcgatgctgtctatatgactggcacgttgacttcttcaaatgtgaaatttctcgttgaggggcagtctacattaggtttgaccgtgacttcaaccgataagacggacactgatgtgaaagttggtgtgcaggtggctcctcagctacttgagtcttttaatgcctctaccggtcgtaactgccaaatgcctcccgaaggtagttatagttttgaaggtggtgaagtggtgattccagcagggcagaaccagtctacgcaaatcaaggtaactgctgattccgaaaaattacaggagggggtatcctactgccttcctgtatctattacctctgtgtcaaatagcgatctgaaagtgatggaaacttcccgtaccgcttatgttatgttgactaaggttatcaatatcaaggctgcttatctggcacgtcggggatattttaatattccttcgttcggtgatcaggaaaaaagtccggtgaaagcactcggacagatgacattagaaatgaaggtacttccagtatccttccctgtcggttctgaaagaaatgctaatggtatcagctcattgtgcggatgcgaagaaaacttcctcttccgttttggtgacggtgccggtaatcctgtgaataaattgcagttcgtgaaaggctctatcggttcggcttcacatcccgataagaaagaccattatgaatcgtgggtagagaaagagtttcctaccggtcattggttgcactttgctgccgtatatgacggtcagtatttacgtctttatttggatggtgagcagattcactttgtggaaactaagaatggcggaaccattaacttgagtatggcttatgacggtcatacatgggaagacactttctccatcggtcgttcagccggtaatgctcgtttctttgatggttacattagcgaatgtcgtgtgtggaacgtagcgcgtacatccgcacagattgaagatggtgtttgttatgtagacccaaccagtgaagggctcatagcctactggcgtttcgacggtgaaacgcaggatgatggttcggtgcttgatatgacaggtcatggtcacaatgctgtgcccggtggaaccattacctatgtagacaatcagaaatgtccgttctaaaagaggtaaaatagaggttgttctttagtacgatgaggtctgctgtcgaatcggttttgcgcaaagcattacggggagatggcagacttctctttttaatatcttattcgtttataaaaaatagttatgctaaatagaatctgtaaatcactactgtttacggctatgatgacaggagttgcttattcctttgcacagcaacttccggcagtaacctataaaaatccgactttgccggtagaaacaagagtagccgacttactatcccgtatgacgttagaagaaaaagtcggccagctcctttgtcctttagggtgggagatgtatgaaatcaaaagaaacgatgtttttccttctgataaattcaagcaactcataaaagacagaaaggccggtatgctttgggcaacctatcgtgccgacccgtggacaaagaaaacattgtcaaccggattgaatcccgctttggctacaaaggccggaaatgccttgcaaaggtatgtaatagagaatacccgtttgggaattcccttattccttgccgaagaagcaccgcacggtcacatggcaattggtgcaaccgtttttccaaccggaatcggaatggctgctacctggtcgccccaacttatccgtgaagtaggaaaagcaatcggcaaagagatacgtttgcagggtggacatatcagctatggacctgtgctcgatttggctcgtgacccgcgttggtctcgtgtagaagaaacctttggtgaagatccggtattgacgggtgaaataggaaaagcgatggtggaaggattaggaggcggtgatttgtcacatccatacagtacattagctactctcaaacactttcttgcttacggtatctcggaaagcggacagaacggaaacccctcttttgccggtatacgtgagctgcacgagaacttcctgcccccgtttaggcaagctatcgatgccggagcattatcagtaatgacttcttataattcgatggacggtgttccctgcacagccaatcactctctgttgaccgaacttcttcggaatgaatggaaattcagaggaatcgtcgtttctgatttatacagcatagaaggtattcatcaaagccattttgttgcgcccactatggaagaagcagctattcttgcattgtcagccggagtagatgtagacttgggaggcgatgcatatatgaatctgatgaatgctgtaaacacaggtcgtatcagtaaaacagcacttgacgcttctgtcgcccgtgttctacgattaaaatttgagatggggctgtttgaaaatccttatgtagatcctgaaaaagcaaagaaagaagtgcgcagtgaagaatctgtaactttggcacgccgggtagcacaagcttcaatcacgttgttgaagaatgagcactctttgcttccgttgaacaaaaataggaaagttgcattaatcggacctaatgcagataatcgctataatatgttgggggattataccgctccgcaggaagaagaaaatataaagactgtcttggatggaatcagggccaaactttcttcgtcgcaagtggaatacgtgaaaggctgctccattcgtgatactgtgacaactgatattgaacaggccgttgcagccgctcagcgttccgaagtcattattgccgtggtgggaggttccagtgcccgtgatttcaagaccagttataaagaaacgggtgcggccattgccgacgaaaagacgatcagcgatatggaatgtggcgaagggttcgaccgcgcaacactctctttattaggaaagcaacaggaactgctcaaagccttgaaagctacaggaaagccattgatagtcgtttatattgaaggccgtcccttggataaaaactgggcatcagaaaatgcagatgcagtattaaccgcttactacccgggacaagaaggagggattgctattgccgatgttttatttggtgattttaatccggcaggacgattgccattttctgtgccccgttccgtcggacagattccactctattataataagaaagctcctcaaagccatgattatgtagaaatgtctgcttctccgctttatcctttcggatatggtttgagttatacctcttttgattactcggatttgcacctgtcagccttgatgccacgttctttcgaaatttcattcaaagtccggaacacaggaaagtacgacggtgaagaagtagctcaactttatttgagagatgaatacgcttcagtagtgcaaccgttgaagcaattgaaacatttcgcacgtttctatttgaagcgtggtgaagaacgggaagtgaagtttattttatccgaagaggatttctcgcttgtcgatcggaatttaaagaagattgtggagccgggaacttttcagataatgattggtgctgcttccaatgacataagattacagacgaaagtggagataaaataggagatacttcgcaaggaggagtagataaggatacaactatccggaaaaaccagatagttcaaaaagaaggtaatcggatgatattaaataagattacctctattcatctatgaaacaaaactctcaaatttagatctcataatgattggtacctgttttattgtcatactgtcaggattatgtgcaagtagatgaatatcaacgttctatcacctgacaataaccattgataataggctgacaataaaatatcccgacttttattgtcagccttacttttatctcttatgatagctttattacctgataaacagtacctttataagtatgcttcgaaggaataccgcatttttgcagcaatctcccgaagtggtatactttgttatcagacaatgacataccgcttttcttcttcagataattcaatatttcgaccggagtaagaaattccccttcctctttcgtttgcgcagtcttgaaatactggtaaaacaattgcaacatagccggtgtctgctcaaactcacggttgttttccgtcataatctgctcatcctcactgtcaaaccagtagcgttcgccatgatgaatctcgtgcatggcttgtgcataaagctgttcataatctatcggctgtgtagtgtcgatgtttcccgtcacttcaatacaaatgaaacggcggcttcccgaaggatcagtcaacaaatccttctgattgcttgtgccgataaatgaagcataccgttgcaattcaagtaccgagcgaccgtgcggtttccgtagattgaccacaggcttttgaagaatatgtttcagaaatccctgttgtggcagagttatctggtcaaactcatcgatattgatgagcgcaaaccgattcagatacagttctgcatcccgtttatggctgaaatcaatgctgtctgtatagtaagcgcgaagcgcaggcggaatcatttcacgacagaaagttgatttatgagttccctgtcggcccactaatatgggcgacgtattgttcgcgtgcattttatctactcctctccaatgtgaaaccatattcaggaaccaacggtggaaaagcaattcccaatgcggatttttgcaaggaaccctatttgccaaagcatgaatacggtctttgccgtcccaatgaggcagatgaaacaggaattcttccaacggattgtagatcggcacacggttggaatgtaagtatcggtctatgtccctgtcccatacgccaataccttcggattgggcatcaagcatgatactgttttgtgcccgtttgtcaataggatgaaaataaaactgaaacgagaaacgctcccggtattccacttccccgatctgcgtattataacggaactcataacgacggttcataaattcgtccatctgcaggctaaggcgttgctctttagtcaggcagttgcttttgggcactcccttacattctttgtatacgtttcttatcatctcgcgtatcagcatcggattttttcttttgtaataacgcatgatggttcgtcgggttacctcctcttccgggatgccggagtagtaacaattttcggcaagcgggactactaacgtttgcaaatcatgatcgttccgatgccagtctgtttctatttcttcgaatgtcttccgcaatgccgcttcataaagcaatgctactgtatcttccgtgtcataccccggcagtgctcgattcagtggagatgcttcagtgctcgatttctcatgataagtcatctcgccgggcataccgatgggttgtgaaagatagaaagggacaggggtgggacggtaaatcaagtccggatcatagctaagacgtgagaattgttccagtttcggctctttcaatagaatgttgaagggaagttgaggctgataacatttaatggcaagccggtaagcatgtgcctgaaacacttcggcttcttccgttgtttgcggtaaagtgccgtccggacgggtgaagcaagtccatatcttgacgcttttaccacttgctcccataaaagccagcattgtttggggaagttcggctgccttttgctttacgatttccacttctgtctttccggctagcggaccgatggtcagttctacaatgccattgtaggttttcattcgcttcactccgttcactcgtccgaaggctgctgcgggaatcactcgtggtagtttgttggcgagggaacaaggctcgtcgggtagaacaaaatgcagggcctgacgtaatccggttaccgggcggagcttggtttcttttttcattttttctatcagcaagtcgatgtctgtcacgcttagtgcctccgtatctccgttttccctgatttgtgtaatcttcatttttcttctcttgatatttaatgagagtaagtgtttgttattggtttcaaaggtacggataaggtacttgtaaaacaaactatttgcgctttatcgcgataaagaatgtgttttcttgttatactctattcaagaaggcggacttgaaacattaacaagtaagtaaagatatgctcgccactgtgtattgttgcataaagacaccgttattcgtacgttaacttaccggtattggtagttcgccacggccgtgacgagatcttcccacggccgtggtaggaattcgtcacggctgtggaaagaagttaccacggccgtgggaaggtaaagataccgtagctttagctgaacaatactgctgctttagctgaacaatactgctgctttagccgaacaatactgctgccttagctgaacaatactgttactttagcagaacaatacctgcttctttagtgaaagataccagatgcgcagcattcatttaacgggggcgacattcgcttcgtagcgagtttatatttcttatacgctctttgctaatattgaacttcttctctttcaatacaaaacttcctgtatttatttccgtatttccactttgtttcgaaaaaaaaagcatatctttgtcatacgctttctgttcatcagcgtgatgaaataggtaagaagcgttttttatatttataaataggaatatttacgacttatccctcgtatttgaaatctagcaagtttctgtccgtagaggggtggttcaacagatattccacgtgaatggccgtatgtcaacatatcgatgaaagatgtgttatatatacacaattagcgtggatgtctgttgttatcattatctttcggacgggtttgctaggcctcaaatacggataatggttcaacagcattcacgcttttattgtacccggttggtttcatgatccttataaatccccaaccccaatctcctgtccgcccggaatgcaaaaagcgcgaatgtttgttgaatcaacatcaacagagcactatttattccttgttgtataacaaattaaaaacaaacactatgtcacaatggattagcatagaagcggcagccgagaaataccgactcgaaaaagagtatatctggctctgggtggaaatgaaaaaaatcacagtgtcttatgagaacgatacagtttccatagatgatgatagtattcagcaatttataaaacggactaagctgggaattacgtctgaatatatcgatgagttagagcaactttgcatggaaaaaaacaaaaccagccgactgtatgcttcactcttgaatatgcgggatcaggaattaatggcaattagaggccaaagttcgcgactggacggtttatggaaaatggtggaggaacaatacgaaagactgcgatcctttgagaagaattctatgtcggacaacgctatttgtagcaactgctggatcagaaagatatgtaggagattgaaacgaattctataattctgtcgtgaatttaatctattaaataacaggctgacaataaaagtacgatctttttattgtcagcctattgtcatggcttattgtcagggtgcaatgagttgctagtcaccgtattatccagctaaaactcctgctgacaataagaaccctccaatttatatgtaaacctaaaacctatgaaacttttctgttattaattacacgcatggccgcagtatagtattcgcaaggaacagaaatcaaaatactgtttaaaccattgtctttcattgaaacttgaatataggcttcattcaataaattttttacgctggctacctcccaaggactaccagcaaaaacattgacttgagaaatctttctacttgtaatcataatctttatagtgtgtttttgtttatactgcaacaaagataagggagaaaagcaacatagaggtgcaatattgtttcatatatagtatacaaatgattcattgaatcaggatttgtattaattgaccagtttgtagtatgattcacataagaaatcctccttcggttgccaaaagacaagtgaaggaggatttatcgataaataggtgcttttttacttatttcttatcgttttcacgaatttccacccggcggatcttaccgctgattgtcttaggaagctcttctacgaactcgatcacacgcggatatttataaggagcagtcactttcttcacgtggttctgtaattccttaatcagttcttctccggcacgtgctttatagtctttggatagaacaatcgtagcttttactacctggccgcgaatctcgtcgggtactccggtaatagcacattccacaacagccggatgagtcatcaacgcactttccacttcgaatgggccgatgcggtaaccggaactcttgattacgtcgtctgcacgaccgacaaaccaaaggtagccgtcctcgtctttccaggcaacatcgccggtgtaataaataccatcgtgccaagcttcatgagtgcgttccgcatcccggtagtattctttgaaaagtccgagaggtttacctttgctggtgcggattacaatttgtccttgttcacccgcttcaacagagcggccttcatggtcgatcaagtctacatcatattgaggattcggcagccccatgcttcccggtttcggttccatccaaggcatggtggagatggtgagggttgtttctgtttgtccgaaaccttccatcagtttgatacccgtcagcttcttgaaagtttcaaatacggcagggttcaatgcctctccggcaatggtgcagtatttaagtgaagacaagtcgtactttgtcaggtcttcgtgaatcaagaaccggaagatggtaggaggtgcacagagagaggtgacatgatattcctggattttttccagaatagctgccggggtaaacttctcgtggtcgtagacgaagatattggctccggcaatccactgtccgtagagttttccccatactgcttttccccagccggtatcggcaatggtgaggtgaagactgttctcgtccaggttgtgccaaaaactaccggtaacgatatgacctaacggataagtaaagtcatgtgccaccatcttaggttcgccggtagtgccggaagtaaaatacatcagagagatgtcgtcgttagtgttcgcatggcgcggacgtacaaatggagcagcattttcgataccctgatggaaatcttcgaagccttccgggatttccggaccgacactgactaacttttcaaccgtgggacattcgggaagagcatctttgatatgttgcaggatgattccttcgccggcagctacgatcattttgatgtcggcagcgttgcagcgatagataatatcctttttggtcagcaagtgggtggccggaataacggttgctcctagtttgtgaagagcgatggtgctataccagaactcataacggcgtttcagaatcagcatcaccatgtcgccacggccgatacccaggctctggaagtaagaagcggtcatgtccgtagatcgtttcatgtcggcaaatgagaattggcgactttcgcctttgtcatttgtccaaagtaaagcgttcttgtcaggttgttcggcagcccaggcgtctactacgtcatagccgaagttgaagttctccgggacgtttattttcaagtttttgataaaatcctcttgtgaactgaaagaggtctgtgataaaaatctttctaccatgatgttattacataattactgccagaaaacgtactgttttgccatcgagcgctttcatgccatgtggaagtttagagttaaaatagatactgtcgccttggttgaggatgatttctttgccttcgatgttgataagcatacgtccttcgatgacaaggttgaattcttgtccgttatgttggttataatggattggttcgtcgtttgctttcggttcaacagtgacgatgaacggatcggcggtacggttcatgaatcctgaagccagtgattggtatttataagctttggtacgttcgatgctgactcctttgccggcacgggtcacgaagtagctgctcattttaggctcttcaccaaacatcagggcgtcgagagctatattatacgtgcgggctattttttgtaacatgctgacagagatatcgtagtctccggtttctgcaagtcggtattcttcggcagagatgtcgctgtcgcgggcgatatcctctgcggtcagttccagtacatcacgtaatccgcggaggcgttctgcgatctgtttaatttgttcattcatacaagtggttcgtatttttatgattaataattctatggtattatttggaggctttcatggctttgatgatagcggaggtgaatccgttgtgttccagttcattgatccccttgattgtgattccgcccggagtggtgaccttgtcgatttctacgctggggtgggtgtcattgttctgaatcagtgcggctgctccttttaaggattgtgctatcatctgcatggcatctttgggacgaagtcccatttcgattccggcttgcatggctgcctgaacgtatttcaatacgtaagcgataccgcaggaggtcaatgcggtggctgccgctattttatcttcgggaataagcatcacggttcccatctcgctgaacaaccggaggatgaatttgtcttgttcatcgttcgtattgcgggcggcaacaagcgtcatactttccagttcgctgatagcggtgttcggaatcaggcggaacatggccatttccggtgctacgacgtaatgagccagttcttcaaaactgatgccggcagctacggagatgagtatctgtttgcttttcagtttcaattcgcgcatcaccggttccataaaccacggtttgacagcaaggatgacaatatctgctcctgtggcagcttccacattgctgttggtgatagagatacccggaaattcctttttcagtttctctagttttccggcactcggattggacacaatgatgtccgaatcgtctatcagacttccttttgccaggccacgggctattgagccgcccatgtttcctgcaccgataatggctattttcatatacgcttatttttaatgagttgttaaaggcaaaggtaacagttaattacgaaaaaacaaaaagcagccggaataagaaataaatttctaataaaggctgcttttatcgttggctgtttattaatcaaatgagcgattagagtactttcttgaaccgggcaaggaagtcttctgcttcctccatagtaagacagagaggaggtaacaggcgaagtacattcgtaccgcttgctccggtaaatacatgctcgtcatagatgaggcggctgcgtagttctttgatgggctcttcgaattcgagtccgatcatgagtccgcgtccgcgtacctcttttatttgcgggaatttcttcagttcttccagtaagtagttacctactacctttgcgttttctatcagattttcttgctcaatgacgtccatcacagcgagtgctgccgagcatgccagatggtttccgccaaaggtagttcccaattgaccatataccggtttaaacatcgggctgatcaggacacctgccatcgggaaaccgttgccgatacctttggctacagtgatgaggtccggcttgatgtcattatattgatgggcgaagaatttaccgctacgcccgtatccgctttgaatttcatcgagaatcaggatcgttcctgtctcgctgcaagctttgcggagttcctgcataaattcggtggtcggtatcttgataccgcctaccccttgtattccttcaatgataacagcgcatgtgtttcctttagacaattcctgcttcatcgcttcaatatcgttgagcgggagataggtgacatgaccgttattgttgataggggcgataatggaaggattgtgagtcgcttctaccgcaagagatgtccgtccgtgaaacgccttattgaaagatacgattttggtacgtccgttatagaaggaagccagcttcaaagcgttttcgttcgcttcggctccactgttaatcaggaacaggctgtagtcttcgtaaccggaaatcttgcccagtcgttcggctacctcttgttggagcttgttgatgacggagtttgagtagaaaccaagtttagccacctggttacttatcattgctgtatagtgagggtgtgcatgtccgatagagataacggcatgacctccgtagagatccagatattccgttccgttctcatcccataccttgcaaccgtcgcccttgacaatgttgatgttatataaaggatatacgtcgaataatttcataataattaaatgaagaattaagaatgaagaatgaagaattaggttacttcatggttcatttgattatttttggcagttttgattgaagaaacaagcagagctatgagttctccacaatcaatctccatactattaaaagcattagaatcgatataatctgaatcttttaaaagattcaaccaatagtcggtttcattagcttcctttaatgatatacttagtttattaatgaagtcagcattgctttgggcaaattcggattctcgaattgaagctccaatagaagtgccggaacgaagaatttgtttgctgaggatgaactcttgtttcatttctcgaagatatttagtcatttgtacaattcgaagtgcaaatgaatagctttttgtattcaataatgaatttgttctattgtggcaattcttcattcttcgttcttcattcttcattaaaacgctgaaggcttcaaacgtagtcctacggtttcttccagattgaacatcaggttcatgttatgaaccgcttgtccgctggcgcctttcagcaaattgtcgatacaagagataatcaatagcttgtcaccgtgtttctccagatgtatcaggcacttattagtattaacgacttgtttcaagtcaatattcttatctacgatgtgtacaaaggagtcttttgcataatattcctcatacatacgaacgatttcttccagcgctactttggttttgactaccagcgttgcaaagataccacgggcgaaatctccacggtatggaatgaagtcgatctccgcatcgaaactattttgcagctgtttcagtgattgcttgatttccggaacatgctggtgctcgaatgctttgtacacactcatattgttgtttctccaactgaaatgactggtagcacccggtttcactccggctcccgtacttcctgtaatggcatttaccattacatcatccgtcagcatcagattcttggcaagcggaagcaaaccgagctggatgcaggttgcaaaacagccgggattggctacgtgctttgccgtacaagtggcacggcggttcagttccggcagaccgtagataaagtcgtggtcgtcgctcataatacggtagtccatcgagaggtcgataatcttcaggtcttccggtatgttgtgactttccatgaatttctttgtatcgccgtgggcagtgcagaaaaagagaacgtcgatttcgtccaaaggtaactggtcggtgaatcttagatctgtttctccatacaagccttcgtgtacgtcggtaattctgtttccggcattactgctgctgttgataaatacgatttcagtttccggatggttgagcagcagacggattaattcgcctgctgtatatcctgcgccaccaatgattcctgctttaatcatatctcttcgtctttgtggttattatagtaaacacgtagcggagtagaagtgactttgataaagcctttggcgtcttcggctgtccagcctttctgcatttcaccgtattctccgaatttagtcttcaccagatcgtcttccgattctacacctacggtagagaaggagagagggcgaagctcgaggatagccgtaccgtttacgttacgctggctttcctgcaacatcgcttcgatgtcacgcatcaccggttcgaggtattggctttcgtggaggaacataccgtaccagttggctacctggtctttccagtattgttgccatttgctcaatgtatatttctcaaggaagcgatgggcgccgataatcaacatcggggcggctgcttcgaatcctacacggcctttgataccgataattgtatcacccacgtgcatatcacggccgataccgtatgctgcaccaatctcttccactttctggatggctttgatcgggtcgtcaaacttctcgtcgttgacagctttcagttccccttttttgaaagtcaggcggagctgttcgctgccttctttttcaacatgtttgaggtaggctgtttccgggagtccttgcgcggagtcgaggatttcaccaccacagatagaagtaccccacaaacctacattgtaagaatatttcagtttggtgaagtccgcgctgaaaccatgtttgttcagataatcaatttcttcctgacggctcaatgccatgtcacgggtcaatgtgatgatttccacattgggagccagtacgaggaaagtcatatcgaaacggatttggtcattgcctgctccggtagaaccgtgtgcgatggcatccgcaccgatttcgttggcataacgtgcgatggccaatgcctggaaaatacgttcggaactaacagaaataggataagtaccgttacgcagcacatttccgaaaaccatgtatttcaggctcttttcgtagtattcctgggttacgtccagcgtcacgtatttcactgctcccagtttataagcattttcttcgtttgttttcagttgttcttcgctgaaaccacccgtattggcacaagctgcatatacttcgtaacctttttctttggcgaggtacatgacggtgaacgatgtgtccagtccgccgctgaatgccaccactacttttttcttcttttcttccatagtgctgtatcttttaaatgttatttctttcttgttcttttttgatgttccgcggctctgtcggatcgtacagcatggctgtgcagatgcagaacttgcggtttttcgctaccagaatatcatggttgatacatccttcgcatcctttccagaaagcttcgtcgtctgtcagttcgttgaaggtgacaggcacataacccagttcggtgttcattttcatgacagcggctccggaggtcagactgaatatttttgctttcggccatcggagacgtgccagttggaaagaagcttgtttgatgcgttttgccagtcctaatccacggaaatcgggatgaacgatcagaccggaagtagccacatactgcttgtttccccatgattcgatgtaggtgaatccggcaaaagtatcgccacaaagagcaataatcgccttgccttctttcatctttgtcgctacgtattcgtgtgtacgttccgcaattcctgttcctcgtacggcggcagcatttctgatagtttccaaaatagtgtcaacgtaaacctcatgtgaggcgtcggctaccataacatctatttgttgagtgtccatttctttattatataataataggtataattattcgatattgggaatgatgagtgacagaagctgacgtattttgctgatggcaactccttcacgcaacaccaacatgattgtatcgtcaccggcaatggttcccagaatttcactgaattcattgttgtcgatgtcatacgccatgctactcgcataaccgggacgggtgcggataacggcaatgttaccggaaaactgtaaagagataaatccgttgttacgtaacatttcaccggcactctggtcggtagaacgtttatacataatgttgttcggcagtacatatacgtactttccgttcatactggcagccttggctactttcaattgtttcaagtcgcgggagagggtggcctgtgtcagttcgaagccttcgcggttcagctcttgcagcagttcttcctgcgaaccgacctccttgcttgagattatcattttgatggcgtctaaccgatttgctttcttcttcattgtataattattctaagaacggtgcaaaagtatgcattatttcggagaaaagatgcataaaaccaaagtttttttgcataaaagtgaaaaatatgctaaacggtgagagcctgcttttttgttttgtgtcaaaatgtataccctttcaatcaaaatacataaggaaagggaggagggaatcgcctatctttgccatgtaggtaaatggataccttaaatatatagacagaataccatgaaacaaaacttttttgcagtcgacctgggcgcaacgagcggccgtacaatcttaggaactttcattgaaggcggattaaatctggaagagattaatcgttttcctaaccacctgattgaagtgggtggacatttctattgggatatttatgcattatatcgtcatattattgacggattgaagttggtggctcatcgtggcgaatccattgcttctatcggtattgatacctggggagtggattttgtatgcgtcggaaaagacggtaacttgcttcgtcagccatacgcgtaccgtgatcctcatacggtaggagccccggaagctcttttctcccgtatttcgcgtagtgaagtctatggcaaaacgggtattcagattatgaattttaattcactttttcaattagatactttacgtcgcaatcacgacagcgcattggaggcggcagataaaattctgtttatgccggatgcattaagttatatgctgaccggagagatggtgacggaatatacaattgcttcgacagcgcagctggtaaatgctcaaacacgtcgtctggaaccggagctgttgaaagcggtaggattgagtgaaaagaatttcggacgttttgtattccccggcgaaaaggtgggagtattgacggaagaagtgcaaaaaataaccggactgggggcaattcctgtaattgcagtagccggccatgataccggttctgctgttgctgccgttccggcattggatcgcaactttgcttatttgagtagcggaacctggtcactgatgggagttgaaacggatgctccggtgattaatgctgaaacggaagcgttgaactttaccaatgaaggcggggtggaaggaaccatccgtctgttgaagaatatctgtggaatgtggttgttggaacgttgtcgtctgaattggggagatacaagctatcctgaattaatcagtgaggcggatgcttgcgagccgttccgtagtctgattaatccggatgatgattgtttcgcgaatcctgcggatatggaaaaagccattgctgaatattgccgggctaccggacaagcagttcccgagaaacgtggacaagtggtgcgttgtatttttgaaagtctggctttgcgttatcgtcaggtattggagaatttacgttcgctttctcctcgtccgattgatacattgcacgtaattggcggcggtagccggaatgatttgctgaaccagtttactgccaatgcgataggaatccctgtggtagccggtccgtctgaagcgacagctatcggtaatgtgatgattcaggcaatggcagcaggcgaagcgacggatgttgccggtatgcgccagttaatcaatcgctctatcccgttgaaaacttatcagccgcaagatacggaagcttgggatgcggcttatattcattttaagaattgcgttcgataatatattgaacaaccgacagaataatcattttttaaactaatagaatatcatgaaaaaagaagaactgattcagaaagcgtatgagattgctgtggaacgttatgcagcagtaggtgtagacaccgaaaaagtattgaaaacgatgcaggattttcatctgtcacttcactgctggcaggctgatgacgttgcaggatttgaagtacaggccggttcattgaccggaggcattcaggcaactggtaattatccgggcaaagctcgtaatattgacgaactgcgtgctgacatcttgaaagctgcttcttatattccgggtactcatcgtctgaacttacacgagatctatggagattttcaggggaaggtggtagaccgtgatgaggtagaaccggaacatttcaagagctggatcgaatggggtaaagaacacaacatgaagcttgactttaactctacctctttctctcatccaaaatcaggtgatttgtcactttctaatcccgatgaaggcatccgtcagttctggattgaacatacaaaacgttgccgtgcagttgcagaagcaatgggtgaagcacagggtgatccgtgtatcatgaatctatgggtacatgacggaagcaaggatattacggtaaaccgtatgaaatatcgtgcattgctgaaagattctttggatcagatcttcgctaccgaatataagaatatgaaggattgtatcgaatctaaagtgttcggtatcggtctggaaagctatacagtaggttctaatgacttctatattggttatggtgcttctcgtaacaagatgattacgttggataccggtcacttccatccgacagaaagtgtagccgataaagtttcttcactgttgctttatgtgcctgaattgatgttgcacgtaagccgtccggttcgttgggattcagaccacgttactattatggatgacccgactatggatctgttcagcgaaatcgtccgttgcggtgctctggatcgtgtacattatggtcttgactatttcgatgcatctatcaaccgtatcggtgcttatgtaattggtagccgtgctgcacagaaatgtatgactcgtgctctgctcgaaccgattgccaaattgcgcgaatacgaagcaaacggacagggattccagcgtctggctctgctcgaagaagaaaaagcgctgccttggaatgctgtttgggatatgttctgcttgaagaacaatgttcctgtaggtgaagatttcattgcagaaattgaaaagtacgaagccgaagtaacttctaaacgataagttatggaaattttaatcggcttattgattatagccatcggtagcttttgccagtccagttcttatgtgcctattaagaaggtaaaggaatggagctgggaaagcttctggttaatacaaggtgtatttgcctggttagtgttcccgtttctgggttcactactgggtgtaccccaagagagcagtttgttcgacttgtggggagcgggaggtgctggaatgagcatcttttatggtatattgtggggagtaggaggtttgactttcggactttccatgcgctatttgggggttgcactgggacagagtatctcattagggacttgtgccggtttcggaacccttcttccggctctttttgcaggtacaaacttgtttgaaggtaacgggctgattcttttgttgggtgtttgcatcacgttggcaggtattgctattatcgggtatgctggtagtttgcgtgcgcaaaacatgagcgaagaagaaaaacgtgctgctgtaaaagactttgcattgacaaaagggttactggttgcactcctggccggtgtcatgagtgcttgcttcgctttgggactggatgcaggaacacctatcaaggaagctgccttagccggtggagtggaaggactttacgccggtctcccggtgattttcctggttacatttggcgggttcctgacaaatgcagtttactgcctgcaacagaatgtggctaataaatcaatgggtgactatgctaaaggaaaagtctggggcaataatttagttttttgtgcgttggctggcgtattatggtacatgcagttcttcggactggaaatgggtaagagtttccttacggaaagtccggtattgctggctttctcctggtgtattttgatggcattgaatgtcacatttagtaatgtttggggaattattctgaaagaatggaaaggtgtgtcaaacaagaccataactgtgctgatagctggtctgatcgtgcttatcttctcattagtgttcccgaatttgttttaaaaaatttaggtatggattacatggattacgcggtttttttataacttgcggcaaaatcagtgtaatccatgcctaattaaaattatatatagaatgaaatcaattttagagaatcgtccgggacttgctaaagaagtaaataaggtagcagaagttgccggatacttgtggcagaaaggatgggctgaacgtaacggtggtaatatcactgttaatatcacagagtttgtagacgatgaaattcgtcagatgaaaccgatcagtgaagttaaatctatcggtgtgactcttccttatctgaaaggatgctatttctactgcaagggaactaataaacgcatgcgtgatttagctcgttggccgatggagaatggttcggtgatccgcattatggatgactgtgccagctacgtaattattgcggacgaggctgtggctccgacatcggaattgccttctcacttgagcgtacataatgacctgttgagtaaaaactctccttataaagcatctgtacatacacacccgatcgaactgattgccatgacacattgtccgaagttcctggaaaaagatgtggctactaatttgttatggagtatgattcccgaaacaaaggcattctgcccgcgtggtttgggtatcattccttataaattgcctagttctgtagaattggcggaagctaccatcaaggaattgcaggattatgatgttgtgatgtgggagaaacatggtgtatttgcagttgattgcgatgcgatgcaggcgttcgatcagatcgatgtacttaataaatcggctctcatctatatcgcagcgaaaaatatgggcttcgagccggatggtatgagtcaggaacagatgaaagaaatgactgttgctttcaatctgcctaaataaaacaacaaatagcacaaccatgaatcgaattattttaaacgaaacttcttacttcggtgccggatgccgaagtgtgattgctgtggaagcagctagacgtggctttaagaaagccttttttgtaacggataaagaccttatcaagtttggtgtggctgctgaaattattaaagtatttgatgagaaccagattccttacgaactttatagcgatgtaaaggctaaccctactattgcaaatgtgcaaaacggtgtggcagcttacaaagcttccggagccgattttatcgttgctttgggtggtggctcttctatcgatactgccaaaggaatcggtattgttgtgaataacccggattttgcggatgtgaagtctctggagggggtagctgataccaaacacaaagcggtgcctactttcgcgctgcctactactgccggaacagctgccgaggtaacgatcaattatgtgattattgatgaagatgcccgcaagaaaatggtttgcgtagacccgaacgacattcctgccgtggctatcgtagaccctgaactgatgtactcaatgcccaaaggattgactgcagctaccggtatggatgctttgactcatgccatcgaaagttatatcactccgggtgcctgggtaatgagcgatatgttcgaattgaaagccattgaaatgattgctcaaaacttgaaagcagctgtggataatggtaaagatgtggcagcccgcgaagctatgtcacaggcacaatatattgccggtatgggattctcgaatgtcggtttaggaattgttcattcgatggcgcatccgttaggtgcgttctatgatactcctcatggggtagccaatgccttattgttgccgtatgtgatggaatacaatgctgaatctccggcagctccgaaatatatccatattgcgaaagcaatgggagtggacactaccgggatgagtgaagccgagggagtaaaagcggctgttgaggcggtgaaagcactttctgccagtatcaatataccgcaaaaattacatgaaatcaatgtgaaggaagaagatattcctgcactggctgtagctgctttcaatgatgtttgtacaggcggtaatcctcgtcctacttcggtagcagatatcgaagctctatatcgcaaagctttctaaagttagtttttgcggaagttcttttcaccacagattacacagatttacacagattattttctaatcggaagccgatatttaagaattaaatctgtgtaaatctgtgtaatctgtggtgtttttctgaaaataattcctatttttgtccaactcaattacatgaaaacacatcggtatgatcgaggataatagtttgggattggaatttaaatatctgattgtaaatgacatggaccgtaaattcggtctgtgggtgaataccgtcggctatcagtctatccctcctgattcaccttatccattgaaagagcatccctccggttacttttttaatgcggaaaaaggaagggtgcttcgcgaatatcagttggtctatatcacaaaagggcgtggtttgttttcatccgattccacttctgaaaagcaggtttgtaaaggccggctgatggtattgtttcccgggcaatggcatacttaccgcccgttacggcagactggttggacggaatattacatcggctttgaggggccaatgatagatgccatcgttaatgatgcttttttgtcgcaggagcagcaaatattggaaatcggtattaatgaagagttggtttccttgttctcccgtgctcttgctgtagctgaagcggataagatttctgcgcaacaatatctttccgggattgtgctccacatgataggtatgattctttctgtctccaagaataaagttttcgagatgagtgatgtggatcagaagatagaacaggcgaaaatcatcatgaatgaaaatgtttccggtaatgtagatccggaagagttagcaatgcggcttaacatcagttattcatggtttcgacgtgttttcaaggagtatactggttatgctcccgccaaatatttccaggaattgaaactccgtaaagccaaacaaatgttagtaggaacttcccaatccgtgaaagagatttctttttttctgggtttccagtctaccgaatattttttctcttttttcaagaaacgtacagggcttaccccgttggaatatcgttcgttcggacgggaagaataaaatagggtgaagtctatatctatcagttattttgctctgattttgggaatatcataaaaactgttacttttgtgacgagattaatgtgtgctataaaccatcattcttgatatgcgcgaacaaagactatctaagatccatttttttattctgctatctctttttggatttgtatttccactccggtcacaggaatacaagttcagaacattgggtgtggaagatggattgtcgcaaataacggtgagcgatatttgccaggatgagaaatcgcgtatatggattgccactctggacgggctgaattgtttcgatggcaatcacatcaaagtcttcaaccactttcataacgactctatcagttatggtaatttatatgtgactcaaatggtggaagacggtcagggaagtcttttcctgttgacctctaccggacttttccagttcgaccttgaaacagaaaaatattatattcttccggtgacttctccctccactcttgccaaaggaaagacgggagtgtggattgcagaaggagggaaactgttcttatacgataagaatacccgcctcttgaaaccgatgtatgccgatttgcagctgccggatagtggcccgacgatggtggaaggttccgaaggaagtctctggattgctttgaaagagggtggggtgatgcgtgtagatacttgcggatcgatgtcacttcacttgcccggaattaaagtgatgaaactgataaaaagtaacgaccagaatatctggattggttcgcaggatcagggcgttttctgtttttcacctcaaggtacgatcatacatcactatgaatataatgataagagtgtttacacggttcgggacgatatggcgagagcgttatgtcaggatttggaagggaatatatgggtaggctacagaagtggattgagtaagattgaagtggctaccgggaaaatattccattatcaggctgatcctaaccgggtgggtgctatgtccaatcgttcggtgacgtctctttataccgacaaacaaggaactgtttgggtggggacttattggggaggggtaaacttcttctctccggaatatcagcattttgtgcattatcatgcttcggacaccggattgtcttttccggtggtcggtgctatggcagaagataaagtcggaaatatctggatttgtacggaaggagggggattagatttatatcaaccggaacagggaaagttcaagcattttaatgcgcatacgggatatcatttcagtacggactacctgaaagatgttgtttttgatgaggctaataattgcttatggattgcagccgactttaccaataaggtgaattgttttcatcttaataactatcggaatgatatctataatctcgaaccgcttggagaagaaagtgtaggagaagccctgtttgccttggcggatactcctcgtaaattgtatgtcgggacaacatccgctattgtgagtttggataaacagaccttgaaatccgaggtgttgtttcatcagaaggaactgtttacacataattataacaccctattgcttgattcgaaaaacagattatggtttgctgccgacgacggttgtgtagcctatgtgattgatgaaaagcggtttgaaacctataggataagtctgaagaaacgggtcagatctcaaaaagagttggtcaatgttatctatgaagatcgaaagggaaatatttgggtagggacacatggcaacggacttttcttgctggataagaaagaacgtttgtttcgtttacatacttctgaaagtgtgttgtcgggagaaaatatcagggtactgggggaaaccccttccgggaatttattgattggtaccgggcatggattgtcaatgctggaacagaaagagaggaaagtggtaaacttcaattctaaaaccggattcccgctgactcttgtgaaccggaaatccatgcatgtatcccgcaaccatgatatttatatgggaggagctaccggattggtaaccattcgtgaaagtagtctgtattatcctccgaaaatatacgatctggagttggctcatttgtatgtcaacaacaaagagataacaacaggcgatcaaaccggtattttaaataaatcctttgcctataccggacggatcaaattgaattacttgcaaaatgtgttttctatcggtttctcaacagataattttctgcatataggcggtggtgaggtagaatatcggttgatggggtataatgatgaatggagcgagaaccgtctgggaaatgacattacttatacaaatatctctccgggtgattatgtctttgagatcaggctgaagaacttcccggaagtaatcagatcgctggatataacgattacgccacctttctatgctacttggtgggcctatactatttatgtatgcgtgattctgactattctattcttcatcgtgagagaatatagaatccgtctgttcctgaaaacttcattggattttgaacttcgcgagaaacaatacattgaagagatgaatcaatccaaacttcgtttcttcacgaatatctcgcatgaaatcagaactccgatcactcttatcctagggcaggttgatctgttgctgaattccggcaaattgtctacctatgcttattcgaaactgttgaatatacataaaaatgcaggtaacctgaaatcattgattacggagttgcttgatttccggaaacaggagcagggacttttgaaactgaaagtttctcaatttgacttatattctttgctcaaagagcattatgtattgtttaaggagttggctgctaacaggaatatttcgtttgttttgcatgccgactgcgagcaatgcctcgtgtggggagaccggatgcaaatacagaaggtggttaataacttgctgtctaatgcttttaaatatacttcagacggtggaactatccgtatggaattggctgatggaacggaggaatgtatgttttccgtttccgataatggtgcgggaatatccgaggaagactatgttaagatattcgagcggttctatcaggttgagaatataggacagtatggaggaactggtatcgggctggctttgagtcagggtattgtgaaagcccaccagggagatataacagtagaaagtcagctgggaaaaggttcttgttttaaggtcactctgaaaaaaggggatgctcactttgattcttctgtcgcccgggttgaaccggagcaggataaggaatatatttattattcggaagacaaagaactgctggttaaagaggtgcagtcagcccaaagtgaaagcgggactactgactgtaaattactggtgattgatgataatgaagaaatcagaaatatccttgtagatatcttctctccgttgtatacggttgaaacagcaagtgatggcaaggaagggtacgagaaagtaaaggtaatgcaacccgacctggttatttcggatatcatgatgcccggaatgcccggaacagagttatgtgccaagatcaagaacaatatagaaacctgccatatccctgtcgttcttctgactgcccttagtgcgccggaacgtgaattggaaggattgagaattggagcggatatttatgtggtgaagccgtttaatatgcggcggctggtgatgcaatgcaataatctgattaatacccgcagacttttacagaataaatatgcccatcagctggatagcaaagcggagaagattgcaacgaatgaactcgatcagaggtttatcgaacaagcgacgcaggtagtggaagataatatggaaaatcccgaattcagtgtagatgtcttctcacgtgagatgggggtgggacgtactgtcttattccagaagataaaaggtatcacgggaagtacgccaaataattttatcatgaatctgcgtctgaaaaaagcggcatattttctgcagaattctccggaaatgaatatatcggatattgcttaccggttaggatttggaaatcctcaatacttcaataaatgctttaaagaactttttgatattgctcctacgcaataccgaaaagctcataatacctcctccgaaccctctgtgaagtgattaaaataagtcatctgaatttttagactagataaaacgaacaattcgatagggtgcaatatattcaaatgcgatacttttgtggcgttggataatgccagcttgtacttgagttttctttggttaggtgtgtccgcacacactttcatttggtagaccgggtgctgtgtaatctttattctaatataataattattgtgtagtattatgaaagacaaatatccatataataaataaaagacaacatcttattggagagaatcaatatattttccccaattaattaagtagtgagtaaaaccttgataattaaccaatttaattttattctagttatgaaaaatttgcagagtaggacaaaagtgcggttgcttcagtcgttccttttgatttccttgagtctctttttccttgtcaatccggcttatgctcaaggcgggtttgcagtgaagggagttattgtggataaaacaggatttcctttgcctggcgccaatgtgatggaaaagggaacatctaatggaacaattacagatttagatggtaatttctcattgaatgtttcgaagaagggagttactttgactgtatcattcatgggatatacccctaaagatgtggtagtgaaagataaaacaatgaatattacgcttgaagagaactctaagctattggacgaagtagtggtagtgggttacggtacgatgaaaaagcgtgatgtaacaggagctattacttccatctcaagcgaggccattgagcaaaaaatggctactaatgtttttgaagcattgcagggtactactgccggtgtacaggtggtgtccggttccggacagcccggtgaatcttcttctatcaaaattcgtggtacttccactttctctgccgaaggggttactcctctttatatcgtagacggtgtgcctttggaaagtatcgatggtatcaataccaatgatattacttctatggagattttgaaggatgccgcttctgcagctatctacggttcccgttcggcgaacggtgtgattattatcactactaaaagtgggcaggaaggtaaagcccgtattgatatcaagtataatcactcatggggtacattgtctcacaaggtgccacaggcaaaccgtaaagaacgtttgttgtacgaccaatatcgtaaagagtattttgaaacatacggcggaggtaatccggatgaaagtagtgatatactgaatgatccgttgaactctttctttaatgtggataacgattatctggacatgattacaagcactgcacaaaaagatcaggtggatatcagtgtaggtggtggtacaaagaaactgaaatatttcatcaataccggttattataatgagaaaggtattatttccaatacaggtttccagagattaaatactcgtatcaactccgattattcaccgacagactggatgaatatgggtagccgtatttctttgacttattctaaaaagaaaggtctgaatgaaggtactttattgagcgcagtgttgactcgtcgtccttatttcaatacttattatccggatggctctttggtcggagtgtttaacggtcagaagaaccctattgcgcaggtcaattataccaccgactttactgattcttataaggctaacttcttccagttctttgaaatcaaattcaacaagtatttgaagtttagagccaatattaatgccaacttctatctggataaacgcaaaaaactcgaaccgagtcttatcaccgacgaatggcagaaacagaataaaggttattcttataattacctgaactggaactggatgaatgaagacatccttacttatgcacgcaaaataaaagatcataattttacggccatggtaggtgttagtgcacagcagtggcgttatgaaaacgaaacatttgtggggataaactcgtctacagattttatctatacaatgaatgcttttgccgcaaacctggatttgtcatctacaggctccacattaagcaatcactctatggcttccatttttgcccgtgtgacttatgattataaaggaagatatttgctcaatgccattatgcgtcgtgacggttcttctcgttttgccaaagagaacaaatggggtaatttcccttccgtatctgtgggatggcgcttctcggatgagaaattcatgaaattctcgaaaaagtttctcgaagatggtaagatccgtgcaagtttcggtatcacgggtaacgaagcaatcggcaactacgactatatctactcttattctccgaattctatttatgacggagtgggtggcgttattccgactcgtatcggtaaagacaatctgaaatgggaggaaactaaacaattcaaccttggtctggacttgaatttctggaatagccgtttgacaatcactgccgattattacgataaatatacagacggtttgctggcaaactaccaattgcctaaagaatccggttttgcatatatgaaaaccaatgtcggtgaaatgagtaaccgaggctttgaaatagctgttaccggtgatattatccgcacgaaggactggaagtggaatgcttctttcaatatctccagaaacgtcaaccgtattgagaagctgtctgaaggtaaggcatatatggaaggtgatatctggtggatgcaggaaggtggccgtgtgggtgacttctacggatttaaaagcgccggtgtctttgcatacgacgaatcgaatgcttttactgataaatgggaacaactgactccggtgtttgagaatggtgtattccagtacaaatatttgttggatggaaaggaatatgcaggtaatatccgtcagaaaacgttgccgaacggcaaaccgttccgtgggggagattacaactgggaggaaccggaaggaacccgtgacggtgtgattgatgataatgaccgtatggtgatcggtaatgccatgcctgatgtaaccggtggtttgaatacaacggtgacttggaagaatttgagtttatacttaggattctattattcattgggaggacagatttataatgcagccgaacataatcgtaatatgttcaaatacaccggaactactccttcaccggaagtcatccataatatgtggttgcatccgggtgaccaggcaatctatccgcgtccgtataatgatgattacaacaatgcccgtatgggtaactcgttctatctggaagatgcttcatttattcgtttgcagaacatacgtgtagcatacgatcttcctgaaaactggataaagaagctgatgttgaagaatataaatatctacgcttttgtaaacaacgccttgacatggaccaactattcgggattcgatcctgaattctctaccaacaatcctctgcaggtaggtaaagactcttaccgttatccgagaaagagagaatatggtattggtttttctgcaaacttttaattgaagatatcgtatgaagaatataaaatattttgttggagctgtatgcctggctctatcgttgaatagctgttcagactttctgaatgaggaaccggtaagtgaaattccggcaggtgacatgtggcagactgcccgtgacgctaaggcaggtataaatgaaatctatggattgttacgttccactttacgggagaactatttctattggggggagttccgttcggataatgtagctcccggagcaccggtaatggccgatcaggcacgtgttatcaacaacctaatgtctacggatgagaaatgtgcaaagtggacgactctgtatcagatgattaaccaggcaaatctggctattaaatatgttcctaatatcagtatgcctgatgtggcagaccgaaatgactatctcggacaagcttatgcattgcgtgctttggcctacttctatgctatccgtgtttggggagacgtacctttgtttacagaacctactgaaaagtattcggaagccatctacaaagagcgtacggataaaaactacattttggaacatgtcattcttccggacctgaagaaagcggaaagcctgattaaccgtaacaagaattacgaacgcaaacgcatttctatctgtggcgtatgggccatcatggcggatgcttatatgtgggctaaagaatataatctggccgaccagaccatcgataagatggcgactatcgcttctaaaaagggcggtcgttttgtagacttcgaacctaacattgctacttggcataccatgtttacggaagagctgactaataaaccttctgatgatacaccggaaaatgatgaatataactccagagagtttattttccttgttcatttcaacatggatgaagtcggcacgaatggttacagttacatgtatcaatggttttccggttcagggaatcgtgcggcagtcatgtctgataagtttatgagtatctttgatgaaaaggatatgaaaggtgatttacgcaaagattatacggtgaagaattaccaaaatggaaatgaattgcgtaaatatatggcaggtgacatcagtaactctttgaataagacatgcgaagtagcctatccaatctatcgttacacagatatgatgttgttgcaagctgaagctcgtgctcatcagggaaaatggggggaagctttggatttagtaaaaactgtacgtgaccgtgccggattgaatacactgactgaaaatgattttgcttcagaagaagaggtagtcaattatatcttgcgtgaacgtcaggtggagttagctggcgaaggacgccgttggtttgatttactgcgtaccgaaaagtggaaggaagtgatgaaacctattaacggaatggagcaggatggcaatgaacttttcccgatccactattcacatatcttggaaaatccgaagattgtgcagaatacgtattatggtaatactaacaactaaaaaaggtagaagcaatgaaaaagacaatattatataagactcttttcttttgttggacaattttggcattgaccggttgtgatctggacttgcaaaagaactatgattatgagccttcggtggatgatccgtatgtaaaagtgacagcgtgggaatattttcaggatcacaaagatatgttctcggagttgatagcagctattgaatatacaggcttaaaggactattatacccagactgataataaatatacttttctggctttgaataatgccggtatgcagctttatcgggagaatgaatttgcaggcgtagcttccattacagattgtgataaagaaaaggtgaagaatatgttgctttatcatattgtagatggagaatatagttcttatgggcaattgcaggtagaaccgatgttcgtcttaactatgctgaaaggtgagactggattgatgacaatgtctgtttggaaaaatccatggcaggctgcagtaggtaagattctggtgaatcagaccggaagcaacggaaaatctccgcaacgacaagctaagactagcaatattctgccgacaaacggtgtgattcatatatttgagaactattgcaaatattccaaataaccacagttaattaaaaagagaactaattatgattcgtaaaatatataccttattaatattaggactttgcttgggctttgctgcctgtggcgacgataatgatggattggatcctaatgcagcggctcctgtgattaattttcctatggagcagctggacgttgatttgaataaagtagacaatctgccggtagtggctgttattaaatcacaggcagggcttcagagcgtgacaatgaaattgcagacggtggagggagtgacagaatataaaactgtaaccgactttttcaatcccaactcgtatagcttgtctgaaaacttggagtacaatgcaaattatgaagcttttatcattgaagctacagataaactgaatcatgttacgagtgggactttaccaattgctgttaccgatgtaatggcacgtcctgtcattacattcgatccggaagagattgtatatgatgagatggatgaaaatccggtaattccccgtactactttcgaagttgtttcggaagccggcttgaaggttgtggaagtgtatttggtatctgccaccggacaggaatcaaaaggaagtgtggaactgaatggcaaaaaggatttctcgtatgacgagatgattaattacaaagaaggcgataaaggtttcaaagtaaaagcagtggatatatatgataatgtgaccatttcaactttacctgtggaatatagaacagtgccaatacctgtattgactttgcctgaattgcctatttttgctacaacagatgcaaaacagggagtgccggtgaaggtcgaatctgtacgaggagttcacgaagtaattatttaccgtattgaaaacggacaggaaatcgaagtcttacgggaacagaagaatggtgagaaacaattggattacactccggaaattgattttactgaaactacgtctcaaattaaagtggtggtttctgatgggagagtgggaaaagaagctgtcggaactgtgaaagcatatgtaaatatggatgttgccacagtgaatatatctagtaagacttttgctaatagtgcgcacgaaaaatatccggatgcttatggtttgttatctttcaaagatttaaaaacgtattctgttgattatgcattagctagtgcggataatgcgaagaatgttgatttgaaattctattgtatgggaaaaggtaaggacgttccttcagagcctcgtctgtattctataaatgctacaaaaacaaatgaatatacaggctccggtggggtatctttgaacaccgcggctgtgaagaataagactatgatagctaaactttccggctttgattatgataatgcaacagttacttctatagcttctgaaatatcagctagtttgattgtgaaagaagaactgattcctatagcggagggagatattattgcctttaaaacagcatcgacttctgcagcaggtggaaacagaatcggagtgatgaaaatcattagtatgacaccatctattggtgaaggtgtactgaagcccggagatacaacagctcgtgtattaactgttgaaatcaaattccctaagaagaagtaagcagggtagtattacctaccgcctgaagtcttaatagaaaacttcttttctattaagactaaacttccctttcattaggagtaaagttgctctctgtccgatacaaactataaatgaagcttccgtttttataaatgcaagttgcgtttataaaaacaaaacttgcaattataaaaacaaagcttgcgtttatagtttataataaggataaaagaagtttgcaacaagggggaaggaagttctctccttgtagagaataacttttctattaatagccaacgcgagagttagtaacagctatcccggtgaaccgtagatagagtatacgaaagatgcgactgataacaaatacgatggttaagtaataatgtgcagtagctgaaagtaatatgagaaaacatataatatataggtatttcctctttttatctttggtcggactgatgcagttgacgtttagctgttcctcctcttccaacgaaatagaacctttgaaaccggaaggagaagatactcctttggaaaaagatgaatatacttttatgaatgtagaataccggaagtggcagaacggaactttccaggcatggacaacggcagattcaagggaaacacgtaccattgataatatgaattggtatactccctcttcgggttatagccggactgcatggggaggacgaatcggtttgcaaccttcatctgtggttggaaaagaaggctttttccgagtggcttattgtggaggccgttcttatttgctcgatccggataatggagctgttatcattcatggaattcagcatgttcgtccgggagaatctactgctcataagaaggctttcggtactcgatacggtagtgaggcgcaatggagtgaagagactggcaaactgttagcaggcaatcatataaactatatttcgtatggctcgaaccgtattgaagtatttcctgctgcagtacgtggtaacttgttgacccctaagacgcaaaagattgcttatgcagagaatctgtatctgcttcgtacctttatgtgggatatgagtaagaatttgggctacgcgtttgatgatgacaaatataatcgcttagttcttctttttgaacccacatttgctacgtacatagatcgtcttgtacaagagaagtcagctttatttgccggtgaccggcattttataggtttctatcttgacaatgagttgccatttgccagttatcagaatgctgaccctttgcgaggaattgatctgaaacatttcttgtctttgcccgaacgctataaagctgctcgtgagtatgcagaaaagtttatgcgggataacggtatagcttctaccggagtgataaccaagaaaaatcaggaagacttccgggggatggttgctgattattattatcagttgaccaccgctaccgtcaggcgatatgataaagagcatttgatattgggaacacgtctgcatgattggagtaaatataatcagaaagtggtggaagcgtgtgctcgttattgcgatcttgtttccgtcaactattatgcacgttggcaaccggaggcagatttcttggcaaacctgaaaatctggtgtggagcgaaaccttttttagtttcagaattctatataaaagcggaagatgccagttatcagggaactggatatgctaatactgaaggaggtggctggctggtgcatacacaaaaaaatagaggtgagttttatcagaacttctgtcttcgtttgcttgaaactcgtaactgtgtgggctgggtacattttgagtataatgatggttacgattctaacggaaaagcttctaataaaggagtggtttccatcgaatacgaaccttatgaatcttttctgtcgcagatgcggcagttgaatctttcagttcattcattgatcgattattacgatacaaaatcggttcaatagattgacggaaactttaaatagacaaattgaatatttagaattaaaatagttatgaccatgaagaagtttagtttatttgcaatccttttaggatttaatatagctttgggagcatgttccgatgatgatgccgctcctgtagtaaaaaatgaaatctttcaacttccggaaaaggcttatgtactggcggaacaatccagacgggctattgtcatcagagatgcggagacgcaccgcaatatttggagttgggatccttatactgcctgtgttcctgctgcacagcagggttggtttgttaatccgagtgaagtaaaaccggttttcaatagacgctatatcttgatgactgcctccggcggagctgtggctttaatccgtttgtccgatcataaattaatgttctacgcaaattgcggacagaatccccactctgcggaggtattgcccgatggaaatatcgtgacggcagaatctaaatccggtgaaatcaatacctttgtggttgacacggttaaggtattgggagcaaaagctaatacggtgaagttgggtaatgcgcataatgttgtttgggataagaaaagatcgtatctttatgctacagctaccaaaaaagagggagtgactgcattattccgttttaagtacgatggcaaccggagtaatcccaagttaataaatcagactaccctttatacattcagcaatgaatcgggtgggcatgatttgttcccggtatatggtgaagaagataaattatggcttactgctgcttcggctgtctataagtttgatttgactggagttaccgacgctacgactaatgactctactgaacctacttgcgagaaagtttacagcatagccgatataaaaagcatctgcaacggaccggacggaatcctgatgctgaaaccgactgaagaatggtgggcagaaggacttgtaaatgagaagggagaagaacttttcaagatggatggagctaagatttataaaggtcgttggatgatagacaatactttcagttatccggaaaagcatgatttcgtattgggcgaagattaaattaagtatagccgaagattgataaaatatataagttgaataattaagtttggaacaatgaggaaacttcttctttttttattggtatctatcgcattaccggctttggcgcaaaacggaaagaaagtgtatgccgacttccacggtgtacgttacacccggcagcatgacggaaagttgggccgttgggaaatgtatgccaatacggaaaaatcaagtaccggaaggaagtcgctgtgttataatgccgatctgatagatagtgaagggcggcatgagatagcggcagtggcttatccccaagtcggaatgcagtccaatctcgatcccgattatatcgaatatcagatattgtcggcaaaagcggctaagatagatggattctttatcgaatgggggttcaagcctcacgaaaatgacatcttgctgcgtgagatgcagaaagtggcagcaaagtatgactttgaaatcggcgtaaactggtgcgacggttggttatattatgactggattacgaagatttatccggaagttaacacccgtgaggcaaagaccgaatacatggctaaatgttatcaatatctggtagatagtgtcttcacaggtccgactgctcctatggtgaaaggaatgcctgttttttatcatttcggtcccggagcgaaagtcgatgaatacaagaaagtgttatcacaagtgaagtttccgcaaggaatgaggcagcccgttgccttacgccgttgggcggattggggaaaactggaaaatgataaatacattcccgtcacccgcagtgatgatatggatgcttgggaaaaagtgggagaaataccgactgcatggcttcctgcccgtgttcgcacaagagatcaggcacatgctgaatgggataattatgccacacaggatgatgttattgagtttatgaaacctttccgtgattcaatttggcatagtaacaatcctgcttataccattaagtcgggatttgccatgccgggaatggataaccggggctgtgcaggctggggacgtggacacttctattatatcccacgtaacaatggagaaacttatcaaagtatgtggaagttctgtatggcagagaaggacagtctggacatgatgtttatcgcttcgtggagtgactataccgaaggacacgaaatagagccgaccattgaaaacggtgaccgtgaactacgtacgactttaaagtatgcggcggaattcaaagacgaacaggcggacgagcgtggattaaccttacctttaatgcttttccggctgcgaaaagaagcccgtttcctggaaaagacgaagatggacgtatccgcttgtcaacgttcgctcgataaggcggcattgttgattagccagggacgttatccggtggcaataggcttgttgtcacaaatagaaaatgatgtcaagacggcaaaatccgctttggcggttgagatgatgcgtttgcgtgagtcggacatgaagattcagggaaagcgaaaatccggtggttacagtgccgaagaaactctctctatctctttgcccaaagagctggtttccaaattacaaatgaataactatgtagggtatctctattttgaatacctggacaagggaaatgaatctctttttatacgttcatctacacagcgcgaaccgaaagagccgtttaaaattgtatcccggatacgtaccgacaatacaggtgaatggaaaagcgcaaaagtagaattgtataaggataatatcgtgaatggattcaatatgcctactttctatttaaaaggaaatgtcgtagttcgtaatttgtcattgggttatacgatctacacagtcaaataaatgcatggatgaagagttttaattggttattagttttatctgtactatcctgcatcggatgttcctctccggttcatgaagacggtaggggatgtgctttcgtatctgacagtattcaatatcgggttgagtttatgtcggcgggatgcgtgcggattctgtcttttcctgaaggtgatacactggtaacaagaagattggtggtcgattcggaaaagccggcttttaaagattataaatgggaagatacaggacagaagctggtctttcgcacccgtgaactttccgtagcttttgataaggcagatgcggctttcacttttcaggaaacatccacaggtaagttattactaaaagagaaaggcgataggaaggcacggaacttcaaacgttcggttgccggaggtgaacaatgtctcgaagtcactcaacgctttgttcctaccgaggatgaggccatttacggactgggacagtatcagaatggaatcatgaactaccgggggaaatccgcacttctgttacaggccaatatggatattgtcaatccgttccttatttcgaccaacggatatggtgtcttatgggataattattcttctacgaagtttgaagatacgaaggagggctactcatttacttccgaagtaggtgatgcctccgactattattttgtctatggcaagaatatggatgaagtcgttgccggttatcgggaattgacgggggacgtgccgatgtttggaaaatgggtgtatggcttctggcagtccaaagaacgttataagtcgttcgatgaattgaaggcagtcgttaaagaataccgtaaacggggaattccgttggataacattgtgcaggactgggaatattggggagacaaacctcattggaacagcctgaccttccatccggcaaactttaatcatccccgtcaagttattgatgaactgcatcaacaggaccatgttcattttatgctttccgtatggcccggattcggaccggaaacggctgtctatcagtctttggattctatcggtgcattgtttagtgaacctacatgggcaggttataaggtttttgatgcctacaatcctgccgcgagggatattttctggcaatacctcaagaaaggactctatgatatgggtgtggatgcttggtggatggatgcaacggaaccatctttccgggatggattcacacagttgaagcaggaagaaaagaccaaatcagctggtaatacttatctgggtagcttccaccgttatctgaacacttattctttagaaatgctaaaggacttctatcaacgcctgcgcgccgagagcgatcagaagcgtatatttatcctaactcgttccgcctttgcctcgcaacagcattatggtacagccgtatggtcgggtgacgtttcggcttcatgggagaatatgcacaaacaactggttgccggcttaaacttgtctatgtccggtattccgtattggacttccgatacgggaggattctttgttacagaacgggatgcaaaatatcccgacggactgaaaagtaatgattataaagagttatattcccgttggttccagtttagcgcatttactcctatcttccgtgctcacggtacgaatgtgccgcgtgaaatttggcaattcggtgaagaggggacattatcttatgataatcaagtgaagtatatccatctgcgctaccgtctgttgccatacatttactcaatgtcccatcaggtaaccgccaataattataccatgttgagaggtttggcaatggatttcacaacagatacccggacatttgatattgataatgcctatatgttcggtacttccttattggtgcgtccggtatttcatccgcaatcggaagaaaagaacatctgtatttatctgccggaacacagcggtaaatattggtatgacttctggaccggagaagcttttgaaggaggaagagaacaaatgcagacaaatatcttcgacatacttccgctctatgtgaaggctggttctatcttgcctttggcagaagtgaaacaatatgcgatggaatatcccgatcgtgaactggaattgcgtatctatggaggagcggatgctgcttttttatggtatgaggatgaaggtgattcctaccgctatgaagagggcgtatgttcgaaagtgccgatgcaatggaaagattcggaacggacattgactattggactgcgtgagggaacttatcccggtatgccggaacaaataaaaatgcatgtgaaattatatctgcctgaaggtgcagctcttgatagcaaagagtgcgtctacacaggtagagaagtaaaaataaagttttaattataagtatatatcgattatgaagaagtttctctatatttttattctattgtttattgtgggatgggcacaggcgcaacagcgtgtggtatacacaatcaacgacggatggaaatttacaaaaggatctccgtttgaagcgcagctggccggctgtgacgactcttcttgggagacggtcaatatacctcatacatggaataataaagatgcagacgacgaaactccgggattttatcggggaccggcttggtaccggaaacaattgtttgtagataaaagccaggagggacgtcaggcagtgatctattttgaaggagccaatcaggaagtgcgattttatctgaacggtcagttcgtgggagaacacaaaggagggtatacccgtttctgttttgacatcacttcccatttgcgttatggacaggaaaacctgtttgccatttatgtgaacaatgtctataatccgaatattcctcccttatctgccgattttactttctttggcggtatctaccgggatgtctatctgcagtttatgaatccggtacacattgcaacgaatgattatgcttcgtcaggagtttatatccgtacacccgaagtgaacaactccgcagcctcggtagaaattactacattactgacgaataatacactccaacctgcagaaatcagggtggaaaatataatctgcgatgcggatggtaaggaagtgaaaaagactcatgcggaaataaagctggcatccggtgaaacaaagacagacatctctaaaaagataaaaatagattcgccccgtttgtgggatatagacgatccttatcggtatatggtatatacgcgtattctcgataagaaaaagggtactttgctggatgaagtggtgaatccgttaggcttgcgctggtttaaatttgattcggaaaagggctttttcctgaatggcaaaggacgtaaactaatcggaactgcccggcatcaggattattttcagaaaggaaatgccttgcgcgatgagttgcatgtacaagatgtactgttgttgaaagagatgggagggaacttcctgcgtgtgtcacattatccccaagatcctgtaatcatggaaatgtgtgataaactgggtattgtgacttcggttgaaatccccgttgtcaatgctgttacggaaactgaagagtttttgcagaactccgttgagatggctaaagaaatggtacgtcaggatttcaaccgcccttctgttatgatttgggggtatatgaatgagatttttctgcgtcgcccttataccgaaggcaagcaattggaagattactaccgctttactgaaaaagtagcccgtgccttggaagcgaccattcgcgaggaagatccttcaagatataccatgatggcttatcataatatgcctcaatattacgaagacgcccatttgaccgaaattccgatgattcaggggtggaacctgtatcaaggctggtatgagccggatatcaatgagtttcaacgtttgctcgaccgtgcccataaggtatacaggggaaaagtgttgatggttacggaatatggaccgggagtagatccgggacttcattcctaccagccggaacgtttcgacttctcacaggaatatggtttggtgtatcataaacattatctccgtgaaatgatgaaacgtccgtttattgccggttccagtctgtggaatctgaatgatttttattccgaatcccgtgtcgatgctgttcctcatgtaaacaataaaggagttgtcggattatacagggagaagaaagatgtctattggttttataagacagctttgtcacgtcgtccgatacttgttataggtaatcgggagtggaaaagccgtgggggagtggtgaatactgcacagaaagaatgtattcagtctgtccctgtattctctaatgcggaagaagtagagctgtttgtgaacaataaaagtctgggaaagaaaaaggtagaagataattatgccttgttcgacgtaccgttcgttggtggagagaatctcttggaagcagttgccgtggctggtgatagcaaattgcgggatatgctccggattcagttccagttggtaggctcacagttgaaagacgaagcaattccatttacggaaataaatgtaatgttgggttctccgagatattttgaagaccgtacagcaaatgtagcatggattcccgagcaggagtataagcccggtagctggggatttgtaggcggaacttcttatcgtcgtaaaacaggattcggcagtatgcttggttcggatattgacattctgggaacggatatgaatccaatcttccagactcaacgtgttggaataaaatcttttaaagctgatgtaccgaatggagaatattccgtatatttgtactgggcagaattggagtcggacaaagagagggaagcgttggtttataatctgggagctgactcggaacagacgtttgccggaaaccgtagcttcggaatttcaatgaatggaacgactgttttggatgatttcaacatagctcgtgattacggatatgcccgtgctgttatcaagaaatttgtagtaacggtgaaggatggaaaaggattgagtgttgacttccataaaaaagaaggagaacctattctgaacgctatccgtatttatagaaactattaatcataaacactgtcaatatgcttaggtctatttatttactgtcttttctcctcctgcaatctttatttgcttttgccgggaatgtaaaggagaatgttccgtcctcttttgatttgtatgtatgcatcggacaatccaacatggcggggcgtgcaacattaactccggaagtcatggataccctccaaaatgtgtatctattgaatgataaggggaattttgaaccggcagtaaatcctctcaatcgttattctacagttcggaaagatttgtcaatgcagcgtttgggaccggcttacggctttgctaaagagatggcccgacaaacgaaacgtcctgtcggactggtagtaaatgcgcgtggaggctcatccatcaactcctggctaaaagggagtaaagacggatattatgaagaagctctttcccgggttcggattgcaatgaagcagggaggtgttttgaaagcaatcctttggcatcagggagaagccgattgttcgaatccggaagcgtataaacagaaactgatttctttggtgaaagacttgcgggaagatctgggcatgccgaatctaccggttgttgtaggacagatttctcaatggaactggacaaaaagagaagcaggtacagtcccctttaatcagatgattaaaaaagtttcttcatttattccccattctgattgggtatcatcgaaaggattgggatggtataaagatgagaaggaccctcattttaatacggaagcacaactgttattaggaaaacgttatgcgaaaaaggtactgaagttctataaacatcaatagaataccctttttcgaggaacataaaagccggctgattcatgagggatcagccggcttttgtatggtgaataactaaatactgccttgttgatagaaaaggaatctatatagttaattgttttattataagtaaattaacctgttgataactttgttgatatccttgttgataactgaaattaggttgtgaataaaaccagtaaagaagagtcgtcataaaaaagaagaaccgcatttctgcgattcttcttatctttagttgcggagatccgactcgaacgaatgacctttgggttatgagcccaacgagctaccaactgctccactccgcgatgtttaacgggtgcaaaggtacggctttttttgaaacaaacaaataatttgctgaatatttttcgagtaaatcatcatttttttcttatttggttgagaatgaatgaaataatgatgaaactttttcttagcacctattaatatacaaatgttaatattctctctattttcttgtatggtctaaagaaaagaattacttttgctcaaaatattcagcaatgtgcaatttgtaacctatgaccgtatccaagacaaaagccaaattagtagatgtagcccgtcagctttttgcgaagatgggagtagaaaacacaactatgaatgatatcgctcttgcttctaaaaaaggtagacgaacgctctatacttattttaaaagtaaggatgaaatttatttggctgttgtggaatcggaattggatattctgtcggatatgatgaagcgggtggccgagaaaaatatctcaccggacgagaaattgttggagatgatatatacccggttggacgcggtaaaagaggtggtctatcgaaacggaacattgcgtgcttatttcttccgtgatatatggcgggtggaaaaagttcgcaagaagtttgatgcaaaggaagtccagctctttaaagccgttcttctggaaggacaggcaaaaggagttttccatattgacgatgtggagatgactgccgacttgatacattattgtgtgaaaggaattgaagttccttatattcgaggccatataggtgcacatctggatgaagatacaagaaatagatatgtgtccaacattgtgtttggcgcactgcatagaacagaaatttaattaaataacttttagtatgggattattagacggaaaaacagccattgtaaccggtgctgctcgcggtattggtaaggctatcgctcttaagtttgctgccgaaggcgcaaacatcgcatttactgaccttgtcattgacgaaaatgcagaaaatacagctaaagaattggaagcaatgggcgtgaaagccaaaggttacgcttctaacgcggctaactttgaagatactgcaaaggtcgttgaagaaatccacaaggacttcggacggatcgatatattggtaaacaatgccggtatcactcgtgacggtttgatgatgcgcatgagcgaacagcaatgggatatggtaatcaacgtgaacctgaagtctgcatttaacttcatccatgcttgtacacctatcatgatgcgtcaaaaagctggtagcattatcaatatggcctctgttgtaggtgttcacggaaatgcaggacaggctaactatgctgcttccaaagcaggtatgattgcattggctaagtctatcgcacaagagttgggctctcgcggcatccgtgccaacgctatcgctccgggattcatcctgacagacatgacagctgctctttctgacgaagtaagagctgaatgggcaaagaaaattcctttgcgtcgtggtggtactcctgaagatgtggcaaacatcgctaccttcctggcttctgatatgtcttcttatgtatcaggtcaggtgattcaggtagatggtggtatgaatatgtaatcgaacagaatgactgttgtatacgaagacaaccatatcattgtagtcaacaagaccgcttccgagattgtccaggcagacaagacgggggatacgccgctttcggagactgtaaaacagtatctgaaagagaagtatcagaaacccggaaatgttttcctcggtgtgacacaccggctggaccgccccgtaagcggtcttgttatttttgccaaaacgagtaaggcattaacaaggctcaacgaaatgtttcgcaccagtgaggtgaaaaagacttattgggcggttgtgaaaaatgctccgcaagaaccggaaggtgaactggtacattttcttgtacgtaatgaaaagcagaacaaaagttatgcatacgacaaagaagtgccgaacagcaagaaagcgatcttgcattaccggttgatcggtcattcggagaattactatttgctcgaagtcgatttaaaaaccggacgtcatcatcagattcgttgccagctggcaaaaatgggatgccctatcaagggagatttgaaatatggctctccacgctccaatccggatgggagcatttgtctgcatgcccggagagtacggttcgtacatcctgtctcaaaagaactgatagagcttgaagctcctcttcccgaagggaatttatggaaaggattcgccatagattaacacggatttccacagattcatttattatgttatttagtagacggtacgcagtttttctgtggaaaaccgtgtaaatctgtggttggaacttgccaaaagagtaaacctgcctgccatttttcttgtaaactctagcgacagttagttaattcctaaataggtagtatatttgcatcattcgctaactataattttcaatcataccaaagaaaaatacgaatgaaggcatttaaactacttgcacttacttcttgtgtcttgcttgcagcgggaaatggagtagcgcaacagaactattcaaaaagtgaaggattattgcagtacgtcgatccgtatatcggatccggttatcatggacacgtctttgttgggacgagtgttccgtatggaatggtacagctgggtcctaccaatatccataaaggttgggactggtgctcgggttatcattattccgatagtattttaattggcttttcacatacccatttgagcggtacgggctgtactgacttatgtgatattctcatcatgccattgaatgagatccgtactcccagaggcaatcaggatgatatacgtgatgggtatgcttccagatattctcatgcgaatgaaatcgcccgtcccgaatattactctttgcttctcgaccgttacaatatcaaagccgagctgacagctacagatcgtgtaggcttccatcgttatacttatcctgaaggaaaaccggcttccatattaatcgacttacgtgaaggaaacggatcgaatgcttacgacagctatatccgtaaggtagatgattatacagtagagggttatcgttatgtgagaggctggagtccttcccgcaaagtttattttgtgttgaaaagtgataagaagatagagcagtttactacctatgatgataataccccgcaaccttgggaccaactgaaagtggcatcggtgaagagtgtcctcacttttggtaacgtgaaggaagtgaagataaaagtcgccctttcttctgtcagctgtgacaacgcagcgatgaacctgcaatccgaacttactcactgggattttgataaggtggtggatatgagtgccgaccgatggaataagcaactggagaagatgacagtagagactgatgatgaggcttccaaacgtgtattctataccgcccattatcatactatgattgcccctacgcttttttgcgatgtgaatggagagtatagagggatgaatgacatgatttacacagacccgaagaaagccaactatacgactctttctttatgggatacctaccgtgcattaaatcctttgatgactattactcaacctgaaatggttgaccatgtagtcaattcgatgatttccatctatcgtcagcaggacaaactccctatctggcctttgatgagtggagagaccgatcagatgccggggtatagctccgtgccggtgattgccgatgcatatctgaaaggatttaccgggttcgatgcggaagaagcattgcaagcaatgatagctacagctacttatgaaaagcagaaaggagtaccttatgtagtcaaaaaaggctatatccctgccgacaaagttcatgaagctacttccatagccatggagtatgcagtggacgactggggaattgccgctatggcacgtaagatgggaaagacagaagatgctgaaacattctcaaaacgtgctcattattacaagaactattttgattcttctatccatttcattcgtccgaaactggaagacggctcttggcgtactccttacgatccggcacgttccatccatactgttggagatttctgtgaaggaaacggatggcaatatactttctttgctccacaagacccctatgggctgattgccttgtttggaggtgacaaaccttttacaacgaggcttgatggtttctttaccaataccgacagtatgggggaaggagcatcgagcgacataaccggattgatcggacaatatgcacatggaaatgaaccgagccatcatgttgcttatctttatgcgtatgccggtgaacaatggaaaacggcggaaaaggttcgttttatcatgagcgatttttacacagaccagccggacggtatcatcggtaatgaggattgtggccaaatgtctgcctggtatcttctttcatctatgggactctatcaggtgaacccgtcggatggtgtatttgttttcggtagcccttgttttaagaaagtagaagtgaaggtacgtggtggtaacacttttactgtagaagcacccaataacagcaaagaaaatatctatatccagaaagtgtatttgaatggcaagccttatgataagagttatatcacttatcaggatataataaatggcagcacattgaagtttgtaatggggaaaaagcctaataagaattttggtaaggctccggcaaacagaccggttgttttgaataagataaatggataaagatggcttacttataaaagacagctaattgttgaaaggaggaagaagcctccgacaatgaaagaataaagctggttctcaatattcaattcagttttcaataggtattataaggctttccgattgtagcatttaattctgcttcggaaagctttattttatactagaaacggctgaaaagcaaatccttaacaagaacttactgttttcagccgttttggggaatatagttttaagaaataagtacatctttcctttaaaaaagaatgtaatcaagactatttttataactatggaagcggatcagcttttgccggtcgtttcggatcataaacggctactcctactttggagtcagcacaaccataatacaaataccatttgtttttgaagtagaccattccttctataaatacggttccatccacatattgcccactcttttcaaagctatccatcggacggaagaacggttcatcgagacgggtgataaagcgggtaggatcattggcgtcgaagagtgcttgtccggcagcatagacattggcggtatagcgtttgtcacctcttcctgaatggttcttaccattataaagaaggacaattcctttcggagtgtagatagccggaggcccacattcggtgagatggctgtcgaagtagccgtcacggggagaaaacagcttttttagggaaccgtcaatgttgacaatcggtgtccagtggattaagtcatcggaagtagctgcgaatacatgctcctctccccagtacataaagtatttcccgttgactttcttgataacctgtttccctttaacaacttcggtcaggatagagccggacttacaacccaggttgaagacctttccatcaaatgctttggcaaaagcaggaccgtgttttgtccagtcttttaggttgcgggaggtcgctactgccaggcgaggtacatagcgattccattgggtgtacatcattacatataatccgtcatcggttacggcaattcgtgggtcttcgcagccgccgggccattccaactctttttgtgaatcattatccggatagaatacaggagtcttttcccgttggaaatgtgtgccgtcggtagaagtggcataaccgaggcgagaagtccggtgtccgataccgacacctgatttatcctctgcacggtataacacgacaatctcaccattgtagagtgtagcagccggattgaatgtatcgttcgattcccacgcaatagaatctttggtcaatggacagtaaaacttagtgttttctataggagatattaccggattgacattctttggacgttcgaaaccaccgaaagcccaatcgggtaatttgttctctttatgattggaagactgtccgtaggcagtacaggtcatcatggttgtagtaagtaggaataaaaaagttgatttcatattgttcatattatatgggtcatttattttttaggagtcatatactccctacatataaattggaaaataaataaaatgctgtcatctgtcacctgattgggcataaatgattgattataaatatactgcagtgtgacagcatgatgtgacggcaaggtgacgacaactttgctgtcactttgttgaaagcaaggattttattgtttctctgctatgtgggtacttatttctctatccggagcggtattcaaggattatcagactattacggaagagagagtttcagtacttgaaactaaaagttctattgcttgaaacttttgtttcgtcagcgagaaactctagtttctcttacttgaaactgtggtttcaaaggcgtgaaactaaagttcttcaaccttgaaactactttggaagcgtaagcttcaaggttagaaacagttatctcataagcaggaatacaataaaaacataatagaagactattgaatactatttagtaagtctaccttgccttcattcacgagttttaggattagttctccaaacagcgtattttgccatgcaaaccaggaacgagtaaagttcttcgggtcgttcttgtggaaagattcatgcatgaaccctgttccggcatccgtatccatcagcattttgatgcaggtcttgatttctgcgtcgttttgactggtgaatgctttcatcataatactcatgggccaaatcatatcatatccgatgtgcgggccgccaattccttcaccggcagtacctttgaagaagtaaggattatcttcgctccatacaaacttacgggtattctgataaataggatcgttcactttcacatccccaagataaggcagggcaatgagactcggcacattggcatcatccattaacagttgattgccgaaaccgtccacttcgaaagcatagattttgccatatttcggatgattgtaaaccgcatactgtttcagggctgcttccacttcgttagacagtgtagtacattctttagctaaatcaggtttcttgttgaccgtattcagaatttcggcagctttgcgcaatgaagttacagcaaagaagttggacggaacgaggaactggaaagttgtagcatcatccgaaggacggaaagcagaagcaatcagtccgaccggctttacaggattaccccagccgtcgttggtcatcgtatcgagtgcacgttccgttttacgttggaaacgataaggacctttcggatcttcttttcgttgctgttccttaaacgttttcagaaccttcgcgatggctgtaagccattcgtcggagaatatactggcatctcccgtcgtcttccagtaatgataagcaagacggataggatagcagagcgagtcgatttcccatttgcgttcgtgcagttcgggcttcatgtccgtaaggtcgctcatccattcgccgccttcggaattcatgttgaaagcattggcatacgggtcgatattgatacacttgaactgacgtttgataacgccggccagcatctttttcagttccgcgtctttgttggcgagttgcacgtaaggccatacttgtgcacccgaatcgcgcaaccacatggcgtggatgtcgcctgtataaacaaacgtatcgtctttgccgtcaaaatgaacagtagtatccagggtgttcgggaaacagttttcgaacatccatgccaagcgggcattcgtcagcagttgcttgatatgcgcaatctgttgttccacagcttgcgagacaaacagacgtttcgatgcttccggacggttcgtctgatagttgttgattttggtattatcttgttggatgacaaaatcactgttcgttatagcctgcatattgctagcaccaaagagtgctatggacaaacaaaaggctttagttatattcatggtaatagtctttttttgttgattagtattgattatgaaagtgttgcggagaagaagtgttaaatctctgcaaagaattcaataagacaggcattgtcgagcagccatttatactgttccttgttgtgtcccgaccaatccctgcctaataatccgttttcatcccggtagttttcccaggcgtgaagcgcattttccaccatcgcattgacatacgccggattcttgtcaatcttatacagagctttcagtcctctgaataagatcacgttaaaccaggccatgtctttatgcactttgacagtcgggtctttcttgtcggcttttgtgcggaaaaaagcatcagttcctgcggctgtctgctgtgcatcgcgcaaatactgttcatctcccgtttcttcatagagcaatacgcccgcctgaatcatctgtccactgttgtaggcgtacttctctttggaaactttccctttcaggttgatgttatcccagtaaagatggtcggtagggtcgcacagatgctttttcgtccaggcatacgtctcttttgctttttcgaggtatttggcatccttcgtcagccggtacaacttgacaccgagcacagtagacggtgcattggaacaagtatgcttcgcttccttctgctgttcacaccaaaagatgccaccgcctatctcatcgctccatccactgtagatatattgatacaatgcaacggctttttccaaagatgcaggcttgtgagtcagttggtaataatcgcagtaatccagtgcaatccagatgttatcgtcataataacgtccgtgctgcccgtacttggtggggtatgactgataacaggccggcaagcgactgttatcccaatactgctccattcccggtagaattcttttctcgagaatctttttgtacttcttgtttccggtcgctttgtataaagccacacaacccgacatcatcccggaatacggccatagaaaagaagccttcagcgttccgttctgctgcgttccgcccgccagataagtaattttttggtcgggattgacaggatacgtttctgttagtagtccgtcattcgtctgatagagattcaatacattagatagaattgagtcggcaatagaaagataacgggtatttcccggtgtctttcccactgcggaggtaaggcaaaataacatacaggctacaaaacatatatttctcataggaatatcgggttgtgtggtgaaactttcaggttataactagatacaaagattatttctgctgacgctggtcgaactccagttccacctttacggggaaatggtctgaaggagtgcgcgcctgataagtcttgatgtcgatttcttccgggcaatcgttcgcctgcttcttttctcccttgcctacgatgctgcggtaagtatcagtcagcacaccatatcttttcacttggaaagacggagaaacgaatatatggtcgatacggctttccgtaaagctgttcgggtcgaagtcgttgaacgtgccgttgatagcatagcggaagccggccttttcgtaagagtcacacaacacccctttgctcacaaaagcatcataagattggtgggtctggtcgacattgaagtctcccgtcaggatggccggaagctctttgcctttgccaagttctttcatcttgtcctgtacgaggaatgcactttccacacgtgccttcttgccgatatggtccatgtgcaggttgaagaaaaggaattcgaagccggtatctttgcatttgaagtgtccccaactgcaaatacgcggcaacacggcatcccatcctttgctcggcacgtcgggagtttccgacaaccaaaaatcacctttctctatcacgtcaaacttgtctgtgcgatagaaaatagcagaatgttcacctttctctttgccgtcgtcgcgacctacaccgatataatcataaccgggtaatgcctcttttatatctttcagttgatgaataaagcactcctgcgtgccgaaaatatcgaaatcgtggtattgcactatttgggcaatgaccgggtaacgttgtccccaaccgtttccgttgattgaatcgccaccgttggcgtttctcaaattgtaggaggcaacggtgatagaagtaggctgatagttactttgacaaccgcaaaagacgatcgcaacaagggcaattagtaaaaggtttttcagtttcatgtttttatagtttgtttggtagataattcattgatctccaaaagtacaatattttattcaaacgaaagagagtaaggtacatctttttctgtggttccccgttgtttattgggtacggggctcatttgaaattgaatattagcacctttaatcagctggtcatgtgtaaggaaattacgggtttgtgatttcccgtttactttcatttccttgatgtagcggttgtcaagctggttgttatctgccttgattgtgatggtctttccgttctccaaatgtaacttcgctgatttgaagagcggggttcctatgatatattcatccgttcccgggcaaaccggatagaaaccgagtgcggagaatacataccaggcggaagtctgtccgttgtcttcgtcaccgcaataaccgtcgggaccggcggtatatagcttgttcataatctcacgtatccagtattgggctttccagggctcgctcgaatagttgtagagatataccatgtgctgaataggctggttgccgtgcgcatattgccccatgttcattacttgcatttcacgcatttcgtgaatcatgccgcggctttccattcccagtttacctgggatgacaaagacggaatccatcatcgcgttgaattctttcttgcctcccatcaggttgataagtccttgcgggtcgtggaatacgcagaagctccagtgccagctattcccttcgcaaaattcaccgctccagtccactgcatcgaaattcggattgaatacgcctttgttgtctttgccaaccatcagtttgcgttccggatgatagacattttggtagttcagcgcgtgtttcttataaatgtcgatttcgctctccggtttaccgagtttcttgcctaatgtataaattgcccagtcgttatatgcatactccagtgtacgtgcaacgttttgtcctatgccgatattgttggcaacatatcccagttggttgtaagactcgtaaccgagacgccccgaagcagtcccgcgaagatgtgcatttgctccatgtttcaatgcttcccaaagagtttcgatatcatacccgcgcaaccctttgatgtaagcgtcggccactacggaagccgagttgttgcctaccatacaatcccgatgtcccgggctggcccattccggcaggaaaccgctctctttgtaagcgtttaccaaaccttcctgcatcttttgattcattgacggatacatcaggttgaggaaaggaaacagacaacggaacgtgtcccaaaaaccggtgtcggtaaacatatagccgggacgcacttcaccgttataggggctgtaatgcatgatttctcccttagcgtctatctcgtagaaactgcgtggaaaaagcatggaacggtatagacaagaatagaaggtgcgcaggttatcaatgttatcgtcttccacctctatcttactcatttcacggttccagatctctcttccgttcgctaccagttggtcgaaactgtttttgccaagctctttgagattcaactccgcctgttcggggctgataaaggaggaagcaacacgtgcgtgtacgatttctccctttttcgtggcgaatccgattaccgcacctgtgtggtttcctttcgcttctgtttcattcggaagaatgttgttttcggaaactgtggaaacgaatgtgaacggtttgtcgaattgaactacaaagtagtttttgaagttttccggcacaccgccgctattcttggttgaatagccgataatcttgttttctttcggaatcactttcacataagaacctttgtcaaaagcgtctacaatcacgtaggcattctttgtctccggatacgtgaaacggaacatgacggcgcgctccgtaggagcaagctcggttgttacgtcatggtcggcaaggtacaccttataataataaggtttggcaacttccgctttgtgagagaaccaactggcacgtcggtcttgatcgaataccagtccgccggtgataggcatgatggcaaactgcccgtagtcgttcatccagggactgggctgatgtgtttgtttgaatccccggattttgtcggcatcatacgtgtacgcccaaccgtctcccattttaccggtctgcggtgtccagaaattcattccccacggcaatgccgtagccggatacgtgtttccggtagacagttcaaacttggattgagtgcctaccagtgtgctgacatagtctaccggattcttaacggcagaagattgcaggctgtacaacacggcacctccaagaaatagcaagtgtttaaatgaaaaatgtgttttcatgaacaaatgaatttatagatttgaaaataatttctacgacgaaaatagggagaaaaggaatgtgcttctagtaatagagaggttaaatcgcctcttgtcgctaaaattaactactctggcacggaaatttacttatattccggtcaaaaaaaagctcggaatgtttttttgtttacctttgtcatatagcaaatctaagaataatacactatgggaaaacagtcggtttatattctattattttttcttaatctgttgatacataacgcttatgcttataatttgaagcaagttgcagataaagagtatatgtctaatagttcgattacatctctgtgccaggatgagcgtggattgatgtggatcgggacctgcgacggactgaatatttatgatggacaggagattgaggaatttaagactcgtgacaaagaggattacttatctggtaatctgattgacaatattgtgtatacgggcgaagatgtttactggattcaaacctactatgggctgaaccgtttgaaccggaaaaccaatacaatcactcactataatgaatttcagaaactcttctttatgaataaagatagtcatggtaatctgttcattatccaggatagtaactgcatttattattatcataaaaaagaaggagtcttcaagaaaatcaatatcacgggaatcccgatttccgatatcgtaaacttctttatcgacggtaacaaccggatgtgggtagtcatgaaaggatacaaccgctgttatgacatacagcaggaagccgcatcgggagatatcaccctgttaccccagaaaacaaacctgatttatcagacttccttgatttattgtttcaatgacgagcaatctctttattacatagacaaggaatttaatttctatgctttccatattccgacccagaagaatgaatttattgccaatctgggtaaggaaatacaggaacgtggcaaaatttcatccattgttcattatcataacagctattttgtgggctttttgatggatggcattctcctgttggaaaaacagaaggagacggatcattatcaaattcagtcgttacctatcaacagcggtgtattctgtctcaagaaagaccgttttcaggatgttgtttggattggtaccgacgggcagggtgtttatctttattcgaacccgctttattctatcaaatcaatggtgcttagcaattataccgagaaaatagaacgccccgtgcgtgccatctatcttgatgatgaacgtactttctgggtgggaaccaaaggaaacggaattcttaaaatctatgattacgaattcgataaaaacatctccgactgtcgggcggaggtgttgactacctctaatagtgctttgagtagtaatgccgtttattgttttgccaagagccaccggaatttgctttggataggagacgaagaaggattaacttattattcatatcgggaaaaacgtatcaagagtataccaatacggatcggtaacgaagatttcaaatacatccatgacatttacgaaacagcagattccgaactgtggctggcgagtgtcggcatgggagtggtgaaagctcgtattgccggaacaccggacaatccggtgattgtggatgcgcaacgttacatcatcaatgacggcgaactgggatcgaactatttctttactatttatgcggagaatgaagccaacctgttgtttggcaataaaggatatggggtattccgctataacgaaacgacgaatggcctggaaccggtgtctactcacaaatacgaaaacatgaccctgaataatattcttgctatcagtaaagacagcagcaataactatcttttcggaacgagctacggattgataaagtacacatcggaaacctcttatcagctcttcaatgccaagaatggtttcctgaataataccattcatgcaattcttagaaactcgtccgacgacttctggttgagcaccaatcttggattaatcaatttcgatacgaaaaggaatgtctttcgttcatacggttttggagatggtttaaaggtggtagagtttagtgacggagccgcttttcgggattcccagactggtactctgttctttggcggaatcaatggagtcgtagctatccgggcggatggccgtccggagcagctttatatgcctcctgtttattttgataagctgtctatcttcggtgaacaatacaatctgggcgaatttctcacccggaaaaaagaaactgaagtcttgaatttgcagtatgaccagaatttcttttctgtttcatttgcctctgtggattatctgaatggtaataactgtacctatttctataaactaaaaggattgagtgaccaatgggtaaacaatggttcggaaagcggagtctcttttacgaatatggctcccggcgaatataccttactggtgaaatattacaatagtgtttttgataaagagagtgatgtctattctctggtgattcgtataggtgatccgtggtatgcttcctggtgggcttatttgatttatgccctgtgtctgcttttactggcagccttgctgatacgttcctttatcctgcgctccaaacgtaaaaagcaggaattgctgaacgagatagagaaacgccatcaaaagaatgtctttgagtccaaacttcgtttctttactaatatcgcacatgaattttgtactccgctgactttgatttatggtccttgcggacgaatcctttcatcgaagggacttagtaaatttgtcgtggactacgtacagatgattcagacgaatgcggagcgtctcaacaacctgattcatgagttgatcgaattccgtcggattgaaacgggaaacagggaagtgcgggttgagtcattgaatgtgtcttccattgtgaaaggaatagccaaaacgtttgttgaaatggctaaatccagaaacatcactttcttgagcaagatacccgagcaggtgatgtggaactcggacaaaggattcctgaatacaattattattaatctgatttctaatgcctttaaatatactcccgacggacagagtatcaagattgaagtggatacgagccgggaaaatatgctggctcttcgtgtagcaaatgaaggaagtaccatcaaggaaaaggattttcagtatatttttaatcggtatgccattttggataatttcgagaatcaggatgaaaagaacttttcacggaacggactggggctagccatctcttataatatggcaaagttgctgaatggtacgttgaaagtggaaaatactcctgacggatgggtaatgtttacactaaccttgccggtcgtggaactgactaccggagtggtggaaaccaagcggctcacagcggaatacatccctaagatagatactcaatcgatactgaaacttccccagtatgagtttgataagatgcgtcctacgcttttggttgtcgatgatgaaatcgaaatgctatggtttattggagaaatcttctcggctgacttcaatgtggtaaccttgcaagatcctgaacggctggatcaggtgatgaatgaggtttatccgaatgtgattatctgtgatgtcatgatgccgggaatgggtggcattgaactgaccaggcggattaaatcggtgaaagagacggcgcatattcctattattgtggtttccggacgacacgagatggaacaacagatggaagccctttctgccggtgcggaaatgtatatcacaaaaccgtttagtgcggagtatcttcgtatctctgtctgtcaggtgatagaacggaaagaggtgttgaaaaattatttcagttcgccgatcagttcttttgaaaagtcggacgggaagttgacgcataaagagtcgaagaagttcctacagtcggttttgaagattatcaatgataatataacgaacaaagatttgactccacgttatatcgccgatcggctggcaatcagtccccggagtctttatcggaagatggaagagataggagaggatagcccgaccgatctgattaaggaatgtcgtttgcacatagcgaaagatttattgctgaccactaaaaagacgattgatgaaattgtattcgattcgggattctcgaacaaagttactttctttaaggtgttccgtgaaaagtatgagtgcacgccaaaagagtttcggatgaaacatttggaagaggttcagcagtagcctgtggcgggaatttttaaagaaaaagaagaagtaaatatccgtgttaatatagtaaatatccgtgccaaaaggtaaaaaaggatagttaattttcttttggtagagtttagtgattttatctttgtctcatcgaagttttttaagtagataaacttgaaaagtattaatttattaatctttaatctaatgaaaaggaaacttagttttttatttctttcagcattgaccgttccattttttatgggttcgtgcagtgatgataaagaagaacaggaagtgaaaccggcaacagatctggttgtcgataataattcggtgacactactacaaggagacgaaattacggtgagtatcacctccggtaatggcgattattatgtgaagccatttgatgaaaacgtggcgacggctacaatcaatggtaataaggtgactattaaagctaccgaaaatagccagttggaagaaaataaccgtacggaaaccactatattaatagtagatggacgtaagaaagtggctagagtgctggttcgggtagcaaaactctgggatttgacggtagatgcaccggaagaaggttttgacctttttatcggtgaaaagagactggtgaagattttgaccggtaacggagattatcagatttccataccggaaggtgctgataagtttttggaagtgggtgaactatccggacaagttattccgttgactgccaagttcgagactggagccgatccggtaaatattacgataacagataagaaaggtaagacaatcactattcctgtggtagtgaacatcgtggatctgacactgaaaagtaatgaagccacttttgctgaaccggatgccgaatctcaatatatctctattgagagaggtaatggcggatatagtttcacttatcaggtgggagacggcgagcctactacggatgcaacgattgtggaagctactgaaaaagagaacctgattaccttgaaacccaaagctagaggtgatgtgaaagtgattgtgacagaccagaaaggttctgtggaggagatttcggtgaaagtgaatccatataaccttaaactggaaaatgaagcaacttctttaatcatcggtggttatgaggcatctacagaaatagctattaccagaggaaatggtgattataagttggcacaactcacagatgataataaaacctatttgaaaaccgcagaattgattacggaagacggggctaccaagttaaaactaacaggaaagaagctcgggagtaccacactggaactgtctgatgcggcaggtcagaaattgacgttaccagtttatgtgaatccggtatgttatcgtatggaatatgacgtatgctttaaaattgatattaaaaagtatgccgaatcacattcagaggtgaaaagtatgaatcagcttacttttgaggttgtgttctacccgacttatactcgttctatgcaatcgtttataggtttggaaagtgtattcctgcttcgtgcagaagctaaggatgtgaatccgcgttttgaaatagccactaaaattaatggtaagagtgatccccgtttccgtagtcagcaaactatttattgcgatgattcggaaggtggacgtaagactccgggtaaatggtatcatatagccattgtatatgatggaacgaaatcaagtactaaagaggcttataaaatgtatataaacggggtgagagaaacgttgactcctgcagataactcttatgaggattgtgcccctaattcatctctcaatctgacagatgtaggtggaaatgataaagcactgttgattggacgttccggagattcatatcgggtaggatattgcaaagtttatcaggcacggatgtggaagagagcgttggacgaaagtgaaattaaagcgaatatgtgcaaaatccttaatgcagaagaacactctgacttgatgggatattgggtattctcgaaaggtgtcggaggtactacagtttttgaaaattggggaaatggcggcagcggattggatgcgcaagtttgtttgcagaatataagcgaaaataaacctgcctggggagcggaacttcttgcaacttataatggagataagagccgctttgaaccaattgaatgtcctcattcatactaaaactaggaatataataatatgagaaacaatatgataacaaaaaaactaatcaaatttgccctgctgttttttcttatcggactgacggcttgtgacaataaactgaatccgggatttgatccggatgattatgaaccgattgttccgcctgaacctgttagaacaatggatgcaatggctagtggcgagcgagtagtactttcgggtgcttcgttgacggatattgttctgaaatggacgcctaccgagaaacacggaaatacagtatatcgttatgaagtattgattgatacgatcgggggagactttaccaaaccggtagaaacgatcttttctgacaataacggtttggaatcgcagttgactttaacccattatcaggcaaacacaataggtaaactggctaaattccgttgcaataccaacggcacactgcgttggaaggtgcgtgcttattgcggattggatcaggctcttagtagtctggaaggttatttcgtaatttttatgatggacggcattgatgatatgccttctgaaaacgagccggtttatatcactggcgtgggcacggaagatgatggtgatgaagcggaagcacaacaaatgctccgtcagaatgaaggaatctatcagactttcactcaattgaaagccgaccagccatttatatttatgtctactgtagaaggtcgcaaatgctattattatgtagacgacaacggagtgttgcgtgagcgtaatgatggtgaagactatacagttacggttcctcaatcaggcatctaccggattaccatcaatatgggtgaacaaacgatcagttacgatgaaataggagctgtatatctttataaccattcgggtgggtatagacaggatttcaactatctgggatatggcaaatggggtgtgaagaattatactgcccggaaacaaacggaaagttgggcaggaagcggtgaaacccgtcatagctttaagatggaaatcaacggaacaacctaccgttggggacataaggagaaagataaagggcaaccgaatctgactaccgacaacagctattataatttatatcaactggcattgggcacagatccatgggattacagtttccgtttctgcgacgaattactgcaatggggcgaaaagcagggaaatgtctattatgctacggtgaaaaccgatgtaaccctctatttcaatgcagagtttggaacgtacacccaccgttgggtagcttcggaaacgaatgaagattaaaactgaataataatatgaagaactatatagtatcattatcaaaaagagctttgttgttaagcggtgcactggcaatatttacagcttgtgacgacggcgatctgggagacatctacaaaggtaattcatccggtgaatatgtgtcggatgtgaactggacagatgcagccgacaaaagtacgggaacttatatcaaatatttctatgagaatgccagcggacgggataccttttgcggaagcatttactgggaaaaaccgaatacaccggaaaccggagaaccggcaagcacgggcggtagcggcggatggtcgcagggacatgcattggacatcgtgatcgatgcttatatccgtcacgcaaacaatcccgaatatcaagctcatttgtatgaaaacatcatgaaacctttcctgccggcttttgatgactggaatgaacattgcggttatggtggcaaagacttctggaataacttctatgatgatatggaatggatggcactgtcttgtctgcgggtttatgaattgactggcgatcaggattactacagtgcgttgatgaagatgtggaaccatatcaagggagcgaagaatgactataaaggggtaggaggaatggcatggaaaacggatgcgccggcttcacgtatgtcttgttccaatggtcccggttgccttctggctatgaaattgtatcaacttaccgttaaggaggctaaagatggctgggaagagcaggctgcttattacctgaacttcgccaaagaggtatacaactggatgacggcttatctgtgtgatatttccaccggacaggtatatgataatcttagtattaaagatgacggaacaccgggagatcctgataaagtagccttgtcttataatcagggaacatttatggcggctgccctggagctgtacaacgctaccggtgaggatgaatatcttcgtaatgcggttgctttcggctcttaccaggtgaataagaagatggattccaactatccggtattcagtggtgaaggaaattcgggagataatcttttattccgtggaatatttgtccgttacttcctggatatggtgaaacagccgactaacagcctttatccggaaaagaccaagaataagtttatcgctgcattgcgcagctgttctgatgtgctttggacgttggctcatcccgaaggctattatgtgtgggagtacgattgggcaaaagcaccgaccttcggtaatcgtgacaacagggaagatcgcctgacaatttccttgaatgcggaagtcccgggagcaacaatgattgaaatccgtgcccgttatgaagactgggtgcaaggtaaagcaacggaaaaggccaactgggtcggaccggatttcggtaagaaagcagaggaataagattgatttattacacatagaaaatcgaaaagaaagatgatacatataaaaagaaatatttgtctggtggctgtttcttgcactcttcttgcaggtatacctttgcagggtgtggcgcaaacgggaagaacggcaaaggtgcaggccacacaaagtaataaaataacagtgtcgggtacggtattggacaagacgacaaatgacccgttgatcggtgtgtctgttgtcgtgaaaggggtggccaatgcaggtacgattacagatatggatggtaagtttacattgaaactgccttatgcggaagctccgttggtgttttcttacctgggttaccagccgcaggaaattgttcccggtgcaaagaaggaactgactgtcttactacaggaagatacgaaagccttgcaggaagtggttgtggtaggttataccaaacaacgtaaagaaacgatgatcggttctgttgctaccatcacgacaaaagatctgacgcaaagtcctactgccaatatcaacaatgcgcttgccggacgtctgccggggttgattgtaaaccagtatgcgggtggtgaaccgggtgtggatcaaagtgaattgtttatccgtggtaaggcaacttacggtaaccagagtgccattgtcattgtcgatggaatcgaacgtgacatgagttacctcgcaccggatgaaattgaaacattcactatcctgaaagatgcttcggccactgccgcttatggtatccgtggtgcaaatggtgtaatcgttattactaccaaacgtggtaaggcagcggaaaaggcaaccgtgaacctgaaagcctctatcggtattaaccagccgatcggtttccccgaatatttaggctctgccgattatgcaactttatataatgaagccagattgaacgatgccaagatgacgggcgcagacatcagcagtttgaaccttttctctcaacaggcgattgacaatttccgccgtgcgaaaggagacaactccgatggtttgggatatgactgggattattatgattttgccttcaaacccggtttgcaggaagatgtcagcctctccatccgtggaggtacggacaaggtacgttattatgtattggccaattacttttcacaaggcggtaactacaaatattcgaatgccggtgaatatgactcgcaaaccaagttcacccgttacaacttccgttcgaacatcgatatcaacattaatcgttatttgagtacccgtttggatttgggggcccgtattaccgaccgtaatgcaccgggtacaacagccggtcgcctgatgaccatctgtgctacccagcctccatatctgcccatcctggtggaagaaaatgcgcatccgcagaatgaggaatacattcagcaaaatcctcgtggaatgctttatggtgacaatatctaccgttacaatcttctgggtgaattgagccgtaccggttatctgaatgaaaagaacacgtatctgaatggtagttttgccatgaatctggatatggaatttctgacgaaaggattaaaagcggaagtgatgttctcttatgatgcttctgaaggacgctggattaatcgcaaactggatacttacaaagacggttatcgtgaatatccgaaatatgcgacgtttatgccgatcgaaggttcggatgcttatatggcaggcggacactatacgggtgcttacaaaacgggtaacaaatatgatattgaccagactattggcaacggattcagtcataacgcttctgacggacgtacttatatacaggcacgtttggattacaaccgtttgtttagcaaccgccacgaagtgaccgccatgttattggcaaaccgtggtaaccgtactgttaacaatgaactggcttatcatagccagggtatcaccggacgctttgcttattattataatcagaagtatctgatggaatttaacttcggttacaatggttccgaaaacttcgctccgggcaaacgttacgggttcttcccagctggttcaatcggttgggtagtctctgaagaggaatttatgaaaaaggcttcctggattgacttcctgaaagtaagagcctcctatggtttggtaggtagtgacaatgtcagcagccgtttcccatatctggctttctacggtggtggcagtggttatgatttcggtaataactttggtacgaatgtaggcggtacttccgaaggtaatctggctaatgcgaatctgacttgggagaaagcccgtaaactgaatgtcggtattgactttactaccctgaaccaacgtttggcattgacgatagatgcattttatgaatatcgttttgacattattacagatatgaatagtgacggtatcatgggatatccggatattgtaggtaaagatgcagctttacagaatctgggtgaagtaagcaaccgcggtgtggatatcgaattgagctggaatgataagattggaaaggatttccgttactatattcgtccgaacctgactttctcccgcaaccgtttggaatataaagcggaagttgcccgcaagaactcctggcgtaaagaaaccggtaaacgtttatacgaaaacttcgtttatgtgttcgatcattttgtagccgatcaggaagaggctgaccgtttgaacaagatcggttatcagccgtggggacaattaattccgggagatgttgtttataaggatttggatcgtaacggagtgattgatgatgaagaccgtacagcaatgggaaatccgcgtagtccggaactgatgttcggtattcctttcggtttccagtataagaactttgattttagtgtattattgcaaggtgcgacaaaatcatctattctgttgaatggggctgctgtatttgacttcccgcaatttgaacaagataagatcggacgtgtgaagaaaatgcatctggaccgttggacaccggaaacggctgctactgccaaatatccggcattgcattatggaacacatgataacaacaagaatggaaacagtagtttgtttttgtatgatgcttcctacctgcgtcttaagaatgtggaaattggttacaatgtatcacccaaattattacgtaaattccatgtgcaacaggcacgtatctatgtacaaggtctgaatctgttgacttttgataaactgggtgatgtggatatagatccggaaacgaaatccggagacggagcttcctggtatcctattcaaaaggtattcaattttggtattgatataacattctaaataagatagaaatatgaaaaagttatatagattttcagcaattgctttattggtcctgccgttggtctttacttcatgtagcgattacctggatcgggacgatgatgataatattacggaagcggacgtttttgcccgttacgaaaaagtgaacggactggtttccgacgtatacgcggctgcaaagaaagcagaccgtccgctggtgttcttcgagcacttcagcaacagtgccattacggacgaatgtgaaggaaccaacgtagagggaaacattacgaataacttcaataacggtgcctggaacccgaattctttgcccggtagtgtagggcaatattgggaagctctttatgaaggaatccgtaaagcgaacctgattatagaaaatgtacagaagtataacacgcccgacaacccacagcaggatggtgatcttcgcaaccgtatcggtgagatgtatttcatgcgtggttatttccacatgctgttattgcgtatgtatggcgaagctccttatattgaccgtgtgattaatgccggagataatatggacttcaagaaagaatctgttcattcgatggttgaaaagattgtgacggatgcgcaaactgcttatggcatggttcctaataaatatgtgaaaacttccgagaattttgggcgtgtggataagggagcctgtctgggattgatttcttttgttcgctgggtagcggctactccgttgtggaacggtgcttctcaatatggatacaacttgcgtcgtgtgtttgaaaatgagtatgcttatgatgctactcgttggagaaaagccaaagaagcggctaaagccgttctggatttcgaagtcggcggaaccaagcgttattctctctatacgaaacatgatgcaaatgatttcaaggatccggctgacggtaatctgaatgacagccgtgtatatgctcgtttgtgggatatgttttatgatatggatgcctttgccaatgagtatgtgttctttatgacgaagagcaaggatcaggcatggcagggtgatatttatccgcccagccgtgagggaagttcgcgccagcaaccggtgcaggaacaagtggatgaatacgaatatatcgtaggtgattatggctatccggtatattcggcagaagcccgcaaaggtggctatgatgatactaatccgtatgtgaaaggtactcgtgacccgcgtttctatcgtgatgtaatttatcacggagctccttaccgtaataataagaacgagtcgaaaacgatcaatacggcgagtggttccgataagattggtgctaccaatgcaactactaccggttattatttacgtaaattccaacaggagtcatggaacaaatccggtaacttcagtatcaatgcgcccgccatctggcgtcttccggagtttatttatatttatgcagaggcttgtaatgaattgggcgaggatatcgatgaagcttataaattggtgaatacggttcgtgaacgttcttttatgaaaccgatgccgccggaagtaaagactaatcaacagttgatgcgtgaatacattcagcgcgaacgtcgcgtggaacttttttatgaaggaaaacgtccgtggacttgccgcttgtatctggaacccaccagtaaggaagagctagcaaaggaaagcctttggaaatcgagcgggagtgacaattcaaaacgtacacagaaatactgggctgccaataacggtgcattgccccgttgccagcgaatgattaacggaatgcgtccggtgcaggatgagaatggggccattacggttgacggtgtgaaatatagaatggagcgtttctgcgtggaagaacgtacgttctctattcagcattatctgttcccgattcgccagagtgagttgcagaagacaccgaccattgaacaaaatcccggatggtaaaccggtaggaatgtataactttaaaaagaaaatcagatgaaacgaatctatacatatatgtgtctgttgcttttgtcggtattatcgtttgccgttacaggttgtgatgacgatgacgacgacgatgtggctaaagacttgatagagttgattgtgaacaaaccggtaatacgtatcgggcagaatgaggaagccaaagtgaatgtagtggttggaaacggaaactataccgtgagaagtttcaacactgccattgcaacggctaccgtttccggcgaattgataactgtaaaaagtggctcacagaatggggccactaccgtcgaagtaatggatggagaaggagtagttgccaatatttctgtgaatgtaggtgtatttgaattggaagtgaatgaaccggaggtgatcttggaagttgccggtgaaaagcaactgattgtcagcatgggaaacttttccagcaatgatgaattgtcttatgaggtggaggatgaaacggttgtcagcatggttaatacagatcagttccgtcctttctatactttgacaggtttgaagaacggacatacaacagtgacttttacagaccataaaggaaaacaggcagtggttcaggtgacggtaaatccgatttctatcgatgtctccaatctgacaccgagagtgggagtcaacaataagatcatgattacggtagaaaaaggaaacggaggttatagtctgacagcagagaatgaagagattgtagctattcagcaggtggatgacactcgtttcaatttaataggtaagaaagcgggtatcactaccgtgtttgtcagagacgaagcggaacaggaattaagtctgaccgtaacggtggtacaggcagataaagtggcaaacctgggtagcggtaattactttaaagtaccgtttgaatataatggtacggcagatgaatcgctaaagaatttgagtacgctcacatttgaggctcgtttcaacattgagtcgttgaatggcaatgacaatggaaatgcccggattaatacggtgatgggtatagagaagaaattcttgctgcgtgtcgatgtgcataagggaggaagcaatgatgaggaacgtttccttcagcttgctgcagatgataaaggtagtattcgctatgagggctctactaagatagaaaccaataagtggtatgatgtggctgtggtattggataatagtaagagcggaagcgaacggattgcattgtatgtaaatggtgtcagagaaacgcttcaattatcaaacggtacgccggatgatttgaaagagatcaatcttacttctgatttctacatcggccagtctgatggtaaacgccggttgaacggagctatcagttatgcccgtatttggacaaaagccttgtcggatcaacagatctccgagcagagcggcaagttgttgagtgaggataaggatggaatggtagctaattggttattcaataatggaaatggtaataccaagacatttgtgtccttggcaggaaagagcttcgaagcagaggcggcaaatattgtttcaagttggaaaacagatccgatattggaaacaagtactcctacagaatgattgtaagaagataggataataaaaaagccatccccggaatagacgaaagtagggatggctttttttgtagtgtgcttactattcttcggcagactatgtcctgcatgttgttggcaaggttattccttgacaggctcagccggtttgtcttttgatgtagtgtctgtgacaactgtatcattgacattggcggcgagtgcaaccagtgatgcctttgcaggcgcgtcttctttagttacagtatcttttactactgtatcattgacaactgttgcgttgatttctgtcggggctgtcacagcttctgcagaactctgagcctttacaaggaatgaaccaccacaaacaaacataaacattgctactactaatactaattttttcataatcgtttgctttaatgattattagacatatgttttcaattctctacctttgtgttaaggaatcggttattgcttttcgctaacgtctaattaaagatcaaagcgcgtgccaaaattagataatgtatgataagtgattgataaataagggaatgaggaagatgatgccaattaggatagtggggaagtatgtgtggagtgtgtggaaactgtggcggggagtgtggaattattccacactccccgccacagttcttttatttaggtaatctatttacttaatttcatccggccagggacaaggtttacctgtcgctttgaaagtcggtcgttgtgcatctacttttcttagaaagttgcccagctctttagaaagtttcttcacgatgtccggatgctgtgcactaaggtcgttgctttctcctatatcatcaggtatgttgaataactctttctttcctgttccatagtaataaatcaatttccagtcaccgtttcgaacggcacaattaaagttgattccgggaccgtcatttccccagttgttaggcatattccagaaaagactccgacccttagctgggttgcctgtctgtttcagcagagggatgaaactgataccgtctatcggttgaactgtctggtagttcttgacacctgccatttcaagaatagtagggtagaagtcttctatcaacaagtagttgttgcatttgcttcccggagctactactcccggccagctgataatcatcggttcgcggataccgccttcataagtagaacctttaccactgttcaatggataattctgtgtatgcagcttgccgtcacgccatccggattcggatgcaagtcctccgttatcactcataaaaatgataatagtgttgttggcttctccattcttttccagccagttcattaaatcacctaaacttttatccattccttcaatcagtgtggcataagcagcttcatggtctgtcattccttttttcttgtacttctcatagaagcgcatatctttgttcaaaggaatgtggatggcatattgcgacatatacaaatagaaaggctgattatactttttcgctttatccagtgctttaatggcttccaacgtcaatgcttcagttacaaaggtttccgttccccaatatttctctaatccgggaacagacatcagtgataccgctttcccatctttggtatgtccgtagttctcttctcccaggtaactggcaagtccaccggccgcatgtccggcaatatttacctcgaatccccaatgatgcggatcttcccctggagtatctatcgctccgaaatgggcttttccacaatgtatagtatgataaccgctgttctttagcagttgcacgaaggaggttcctacgaaagtatgattagtgccggacacttgacttactccattgtaattccagtcagggactgccagaatgctatctttacggtctgtcattgtattcttttgcagcgtccagttagttactcggtgacgtgcggcgttggttccggtgatgaggctgcaccgggtaggagaactgatactgttggcatacgcttgagtaaacatcattccctgtttggctaaccgctccatatttggagtctcgtacaattcgttatagtgtgtcttctgtgtccagaatgggagtgaagtatcctgccatcccatatcgtctaccataaagagaatgatattcggacgtttgtccgcgtgttctatttgcatattgctttgtgcttgcagattggttgctgcgagtggcacaaatgcaaggggtaataatgtttttttattcatggggggcattttattctatggaatatgcattaaaattaataatatctggtaatgcgatagattcggttaaagataagttcgagcactacaaaaaggaatcatttctcaccgtgatgagaataaatactcataatagtgagaattttttctcattgcattgagaaaattttctcataggcatgagaacacttgagaaaatgcaagaatgtaacttgttacaaatcaatattgtataatttcaatttattatataaagtctttcgatcaatattcagtaattgcgctgctttactcttattgtttcctgtttggcgtagcgcctccaaaatatgctctttttcagtctcttcattgcgtaatgcaatgctcgtattgctggatgcaggagtttctaaaagctcggtccccaattccaataaagtaatgaaactgctttgtgccaataaagttgctcttttgacgatgttcttcatttggcgcaaatttcccggccaatgataattcattaaagcttgcgatgcttttgcatcgaaaccaatcaggtgtttatccagttccttgtttgcctgatcgaggaagaaattggcaaagagcagaatatcttctttccgttctttcagatcgggcatacggagggtaaattcattgatacgatgataaaggtcttcacggaaagtacctttttcaatggcttgttccagattctcattggtggcagataccagacgaatatctaccgatatctcctgtgtagaacctaccggacgtatttttctctcttgcaaggcacgaagcagttgtatctgcacttcataactaaggtttccgatctcatccagaaagatagtaccaccgttggctgcaacgaaagcacccgttttatctgtcagagcacctgtaaacgaacctttcacatgaccgaaaaattcggaagcagccagttctttggggatagaaccacaatctacggcaataaacggtttatcgtttcgtttgctaagttgatgaatacggtgcgccacatactcttttcctgttccgctggaaccgttgataagtacggacatattggtcggagctaccagacctacataattgtagagttgtttggctgcatcactttctccttccagataagcacgatgattttctgttgaatctttagatgaagtagaagcaccttttttagaagaagatttagcaacgttatgagtagcaggactcttttcagactgtagacattcagaaattttcttcagtaattcttccggatttaccggtttggctatataatcacgtgctcccagtttcattgcctgtacggcggattgtatatccgcatagccagtcatgatgattaaaggaatgtccatgccttgttcattcatccatttcagcagatcgataccttcgtggtcgggtagtcgcaggtctgataaaatcagatcgacgttttggctttcgatatgttttcgggcgcgggcaatattactcactgatgatacttcaaagccctttttgcctagccaggtttttagcatcattccaaaagtgatatcatcttcaacgatcaatatggagctcatcatgtcaggttttgattcttttaagtcacaaaggtaagaggatttaggcgaaagtggtatatttgcaaacttaaattaaataaaagtgttatgaaaaagattctattgataatattaaccatatcgttttgcggacttactgcctgcaaaaccggaacaaaaaaaggaggagacatggataaagaaacgttggtaaagattgagacaactgtaggagatatcgaggtgaaactatataatgagacaccgaaacatcgtgataattttatcaaactggtgaaggacggtgtttatgaaggcacactgtttcatcgtgttatcaaagattttatgattcaggctggtgacccggactcaaagaatgcaccgaaaggaaaaatgctgggtacgggagatgtaggttatactgttcccgctgaatttgtatatcctaaatatttccataagaaaggtgccttgtccgctgcccgtcagggagataatgtgaacccgaagaaagaatcttccggttgtcagttctatatcgtgacaggtaaggtgttcaatgactctaccttgctgggtatggaaagccagatgaatgagaataagattaatgttattttcaatacgctggcacagaaacacatgaaggaaatttataagatgcgaaaagcaaatgacgaaaacggtctttatgatttgcaggaaaagttgtttgcagaggcacaggaaatggcagctaaacaaccggaatttcatttcactccggaacagattgaagcctatacaacggtgggaggaactccgcatctggatggcgaatatactgtgttcggtgaagtagtgaaaggtctggatattgtggataaaatccagcaggtgaaaaccgaccgtagcgatcgtcccgaagaagatgtaaaaataacaaaggtgacaatacttgactgaaatatatgaaaatcaacaggcatattcttgataatgggttacgtctggtacattcgcaggacgaaagtacgcagatggttgcccttaatatattatataatgtgggagctcgcgacgaagatcccgaacataccggttttgcccatttgttcgaacacctgatgttcggagggtcggtgaatattcccgattatgatatgccgcttcaattggcgggtggagagaataatgcctggacgaataatgatataaccaattactacctcactgtacctcgtcagaatgtagaaaccggcttttggttggaatccgaccggatgttgagtcttgattttagcgaacggagtctggaggtacagcggggagtagtaatggaagaattcaaacagcgatgtttgaatcagccttatggggatatcggacatcttttgcgtcctctggcttatcagacgcatccttatcaatggcctactatcggaaaagagttgtcgcatattgccaatgctacgctggaagaagtgaaggcattctttttccgtttttatgctcctaataatgccatattagctgtgaccggtaatatctctttcgaagaggcggttgctttgacagaaaaatggttcggctctattcctcgtcgggaagttcctcaacggaacctgccacaagaacaggaacagacggaagaacggcggctgacggtagagagaaatgttcctctcgattctttatttatggcataccacatgcctgcccattgccatccggattattatgcatttgatattttgtcggatgtgttgagcaacggacgttccagccggttgaaccagcgtttggtacaacagaaacaattattttcgagtatagatgcttatatttccggcagtgtagatgcggggttattccatattagtggtaaaccttcggcaggtgtcaccctggaacaggcggaagcggcagtgcgggaagaactggaactgttgcagcaagaattggttgacgaacaggaactggaaaaagtgaagaacaaatttgagtccacccagatattcggcaacatcaattatttgaatgtggcaaccaacctggcttggtacgaattgcttggccgggcggaggacatggaaaaagaggtcgatcgttatcggtctgtcacggctgaacaattgcgggcggtagctcaatctgctttccgtaaggagaacggagtaatactatattataagaaacaacaaaattaaattctcccttttttataatttatcagtgaaaggggaaagtccctttgcctgaaaatggagatacgtttaggtaacggaaaagtaaatgagacatatttatagtacatataaagagcattataaagcactaatttttctcggactaccgattgtgatcgggcaaataggagtgatcgttctcggatttgcggatacgttaatgatcggacatcatagtacgattgagctgggagcagcttccttcgtaaataatgtgtttaatctggcgattattttcagtacagggttttcgtatggactgactcccattgtaggagggctgtatgggactcatcagtatgctcctgccggacaggcattgcgcaacagcttgttggcaaatctgatggttgcattgctgctgactatatgtatgactgttctttatctgaatatcgagcatctcggacagccggaagaattgattcctctgattaaaccgtattaccttgttttgcttgcttcattagtgtttgtcatgcttttcaatggattcaagcaattcacagacggaataacggatacccaaaccgccatgtggatattgcttggaggaaatgtcttgaatatcataggaaactatatcctgatttacggtaaactcggattgcccgaattaggtttgttgggagcaggtattagtacgttgttttcgcgtattgtgatggtgattgtatttataatcatctttatgcgtagtccgcgtttcgtccgttataagattggctttttccgtttgggatggtcacgtgcagtatttggacgcttgaatggactaggatggccgattgctttccagatgggaatggagacagcctcctttagtttgagtgctatcatgatcggttggctaggtacgatcgctttggcttctcatcaggtgatgttggctatttcgcagtttacctttatgatgtattacggtatgggggctgctgttgctgttcgtgtcagcaatttcaaaggccagaatgacatcgtcaatgtacgccgttcagcctatgccggttttcatctgatgatgacattgggtgtcgtgctttccttgattgtcttcctttgccggaattacttgggaagctggtttaccgacagccaggaagtggttgctatggtgacatctttaatttttcctttccttgtctatcagtttggcgacgggcttcaaatcactttcgccaatgctttgcgtggaatttcagatgtaaaactaatgatggttatcgcctttatcgcctatttcgttatttcgcttcccgtaggatatttctgcggctttgtaatgggatgggggatagtaggtgtctggatggcatttccttttggtctgacgagtgcgggactaatgctctggtggcgtttccactacatgacaaaactccccgaaccccaccccaaaacctaatacttaatacttaaaacttttatcccaatggcttccttccgttttacaaagttgaaaataaccgccggttacactttgttactggcgatcctccttttctcgctggtgtttgtacatcgtgagatggaagcattgtcggcagccgacgatcagcagaacttaagaactgatagtctattgacccttctccacgagaaagatcaaaacacgattcagatgttgcgggtgttaagtgaagcaaacgacagccttctctctgcttcggagattgaagaaatcatttccgaacaagattctgtcattacccagcaacgggtacaacatcgggtcattaccaagcgtgactcgttaataactactcctaaaaagaagggattcttcaaacggctcgccgaagtgttttccccttctaaacaagacagtgccgtattagttaatacatcgctggaagtagccactgataccattcttcaaccgactacttctaaagattctcttcagcagaaaatccgcatggctaccgaagaaaaacggttgcaacggaagaaaaccatccggcgtaccagtacgaagtaccagcggatgaatacacagttgacggcacgaatggatagtctgattaaacaatatgaggaagaaatgaccctgcgtgcccgtcaggatgccgagcttcagcaggaggtaagaatgcggtcggcgcgtatcatcggcggtatcgcggttggtgccgtactattatctgcttttttcctgatattgattatgcgggatatctctcgcagcaaccgttatcgtcagcaattggaggtggcgaataaacgcgcggaagatttgcttgttgcccgtgagaaattaatgctggccattacccatgactttaaggcgccgctggggtcaatcatgggatataccgaacttctgtcccggctgacagaagatgaacggcaacgtttctacctcgacaatatgaaaagctcttcggaacatttgttgaaactagtcagtgacttgctcgatttccatcggctcgatctcaataaagcggaagtgaaccgtgtaacctttaacccttcccagctgttcgacgaaatttatgtcagtttcgaacctttgaccgctgccaaaggtttagccttgcaatgtcacgtcgccccggaactgaacggaagatatatcagtgatcctttgcgactccggcaaatagtgaacaaccttttgtctaatgccgtaaagtttactcaaaaaggagagattagcctgacagccggttatgattcttctaagttaaccattgctatcgccgatacaggaaaaggaatggcatcagaagatcgtgaacgtatctttcaggagtttacacgtctttccggtgcgcagggagaggaaggtttcggactcggactctctattgtgaagaaactggtaaccttgcttgaaggaaccattgacgtgcaaagcacattaggaaaaggaagctgttttactgtaactctgcctctttatccggtaggtaaatccattgcggaaagtgaatctcccgaaagcgaaaatgtggatataacagaggagtcggccgcgattcctccgatgaaagtcatccgtgttcttttgatcgatgacgataagattcagttgaatctgactgctgccatgttgaaacaacatggtatcgatgcggtatgttgtgaacagctggagcagttgatcgaacagcttcgctcttccgtcttcgatgtattgctgacagatatacaaatgcctgctattaacggttttgatttggtaaaattattgcgggcttctaatataccacaagcaaaaacaatccccgtcattgctgtgaccgcccgtagcgaaatggataaggcagctttacatgaacatggctttgccggttgtctgcataaaccgtttacagtaaaagaattattgatgacggtaaatgaagggcaactctccgctgatgaagcgcatatcacagaagatatggcaacagccggaataaatttctctgcacttactgcttattctgaagacgatccggaagcagcatcctccattattcagacttttattgaagaaacaggtaagaatatcgaacggatgcaacaagcgctgaacgataaagaggtggacgggatagctgctatggcgcataagctcctccctctctttacaatgattggagcggatgaaaccataactccattaaaatggctggaagcttgtcgtggagaaaaattctcggaaaaaatagaagaaacaacacttaatatattagaggctgtccataaaataataagtgaggcagagcgctatttgatagtgatgaaaaatacccgataagctattttcttctactccttggctagtatctgtatctttcttactattagccaaaccttttttcaaaataatttgtttactttgtgtcaccttatttacactgacacattttacatgaaacgaaaatggatacgctgggtaagctggatactgcttactcctataatactctttgtaatactaatggtattgctttatgttcctcccgttcagaatcttttgcgtcgggaggttactgcatacgcctctaaggcaaccggtatgcagattcaggtggaacggatagaccttcgtttcccgcttaatctgttggttcgtggcgtagaggttattcaacagccggatactcttttgtctttggaaagcctgaatgtccgtgtgcaggcatggccgttaataaaaggaaaagtcgaagtggatgaagtcactttgagccgggtagccgttaattcagccaatttgatggaaggaatgaagattaaaggcgttttaggacgtttcttcctgcaaagccatggtgttgacttgtccaatgaaatagcgattatcaatcaggccgaactgtctgatacccatgtgcagttgctgatgaatgatactaccaccactcctaaagataccacagcctctgctcctgtaaactggaaagtggatcttcatcagttgaaattaaagaatgtatcattcagtatgcaacttcctgttgattccatgcggatggcagctcatatcggggaggctgctattgatgatgcacaggctgatttgaaaaatcagttttatggtttgaagaagtttctgttgtcgggaacttccgccagttatgatacaggaactgcgcaaccaatagaaggttttgatgcttcccatattgccgttcgtgatgttcgcatcgctttggattccctgttgtataaaggcagggacatgaatgcggtcattcgtgagtttacaatgaatgaacgttccggattaagtgttgtttcactgacaggtagagcatactctaacgattcaatcattagtgttcccggtttaaaactaaaaacccctcattctgaaatcgatttatctgcccatacttattgggaacttgtcaacatcccgactacaggacgtttgtccgccaatctcaatgcctatatcggcaaagaagatgttatgttatttgcaggaggattgcctgatagctttaaagaagcctatccatttcgtccgcttgtcattcgtgccggtacggacggtaacttgaaacaaatgcagatttcccgttttacggtagacttgccgggtgcttttgctttagaaggcggcggtatgatagaaaacctggctgacagcctgactcgtaccggaaccattgggctgaaaatgacaactcaaaatttgaacttcctgaccgctctgtcaggagaggctcccaatggtacgattgtagtccctgacagcatgaatctggtggcgaaagttgatatcaaaggtcctgaatacaaagcaggcctccgtctgaaagaggggaaaggagctatggacgtgaatgcagcattaaatacatctaccgaagtttacaaagctgatctgaagatagacaatctgcaactccataacttccttccgaaagattctatctacgaactgtctctttcggctgcggctaatggtcgtggactggatgtcatgtcttatcattcttttgccaaactgaatctttcattagatcagcttcattatgcaaaatatcatctctccaatcttaatttgacaggagaccttaaaggcgcactggtcaccgcacatctgacaagtgacaatgctttattgaaaatgacaaccgatgcggaatataatttggcgcacagttatcctgatggtaagataacggttgatgtcactcaactggatttacatgaattaggaatcatgccgcagccaatgaagcgtccgcttacttttaatttagctgccgaagctcgtcgggatttagtctcggcacatttcgtttctggagatatgaaactcgacttgagcgcacgttccggcgttaatcctttaattcgccaatctactcactttgtggatgtattgatgaagcagattgatgagaaagcattgaatcacgctgaactgcgtaaggcgctaccgacggcagttttctctttctctgcaggacaagaaaaccctttggcatattttctggctactaaaaagatagcttaccatgatgcttctgtgaaattcggagcagctcctaattggggaattaatggaaaagccgctattcatgctttgaaagtagacaccttgcaactggacacgattttctttacagtcaaacaagataccacactcatgaaattgcgtgccggtgttattaacggaccgaagaatccgcaattctccttctctactacactgacaggagagattcgtgaccgggatgcggaactgctggtagattttaagaatggaaaaggagaaacgggcgtactgctcggtgtcaatgcgcgtcctttgtttgaagggcaaggaaaaggcgatggattagctttcacattaatcccggaagaaccgattatcgccttccagaaattccattttaatgagaatcacaactggatttatgtgcataagaatatgcgtgtatacgctaatgtagatatgtgggacgatgaaggaatgggattccgtgtacattcggtgcggggggacactgtttctttacagaatattgatgtcgaaatccgaagaatcagtttagccgaattgagcaaagtactgccttacttcccggaaataaccggtttattctctgcggaagcacactacgtgcagactgaaaaagatcttcaactctcggttgaatcatctattgacgagctgacttatgaacgtcaacgaattggtgatgtaacattaggagctacctggttgccgggcgaacaagggaaacaatatcttaacgcttatctgaatcatgacaaagtggaagtgatggtggcggatggcaagctggttccaacccagacagggaaggatagtctggaagtaaatgccactctggagcacttcccgctccgtgtagcgaacgtattcattcccgatcagatggttacattagccggtgatatggatggtaatctgaacattaccggtagcaccgaacaacctttgattaatggcgaactgatattggatagtgttactgtcctttcccggcagtatggtgctaacttccggttcgataaccgcccggtgcagataaagaataatcgtttggaatttgataaattcgctatttatacaacaggaaagaatccatttacgattgacggatctgtcgatttcagagatatgtcccggccgatggcaaatctgaatctgctggcacagaactatacgcttctggatgccaaacgtacccgtgaaagtctggtttacggaaaagtatatgctgatttccgggcaacggtgaaagggccgttagacggattgaatatgcgtggaaacatgagtttgctgggcaatacagatgtttcttatatattgaccgattcaccgttgactgtgcaggaccgtttgggaagtttggtaacctttacttcatttagtgacaccactacggttgttcagcaagaagtgccgactgtttctttaggcgggctggatatggtgatgatggtacacatcgacccgtccgttcgtttgaaagtcgatttggacgcaagcaatgacaatcgtgttgaactggagggaggaggtgacctctctatgaaatatactccgcagggtgacctgacattgaccggacgctatacgttgagcggcggtttgatgaaatatgctttgcctgtcatcgctgccaaagaatttgctatcgacaacggcagctatgtggaatggacgggaaatcctatggacccgatgctgaacttcaaagcaaccgaccgtatccgcgcttctgtctccgaaggagagaatggtggaacacgtatggttaatttcgatgtgtctatcgtcgtcaagaaccgactggataatctttctttcgcctttgacgtatctgcccccgaagacgcaaccatacaaaatgaattgacggctatgggcgcggaagagagaggtaaacaggctctatatatcatggttatgaaaacctaccttggcaccggaccgattggtggcggaggtggtggactgggtaaactgaatatgggttctgcattgaactccgtattaagtagccaaatcaactcattgatgggaaacctgaaaaatgccagtgtttctgtcggtatcgaagaccacgatctgtcggatacgggtggtaagcgtacggattacagtttccgttattcacaacgtctcttcaataaccgtttccagattgtaatcggaggtaaagtttctacgggtgagaatgcgacgaatgacgcggaatctttcatcgataacatctctctggaatatcgtttggatagaaccggaacccgttatgtccgtctgttctacgataaaaattacgaaagtgtactcgaaggcgagattacggaaaccggagtcggtctggtacttcgcaagaagctggataaacttagcgaactgttcatctttaagaaaaagaagtaaacatgaaaggtatatatagtaacatattaataagttgcctgatgggtatcatcttattctcgggttgttcggtgacaaagcatctgcccgaaggggaggtactttatacaggaggaaaaactgtcatacagaataaatcgacaacatcggtaggagggacagctctgacagagattgaggcggcccttgataaaactcccagtacgaagatgttgggagggcttctgcctattccttttaagatgtggatgtacaatgactttgtgaaatataaaaaaggatttggaaagtggatgttcaaccgtctggctgctaaccctccggtatttatttccactgtcaatccggaggtccgcatcaaggtggctacaaacttgctccgtgattatggttacttcaatgggaaagtgacttatgaaacattggtcgataagaaagacagcctgaaagcaagtattctttatacggtagacatgaagaatccttattttatagatacggtttattatcagcgtttcactccccaaacgttgcgcattatggaacggggacgtcgaatgtcttatataagtcccggcgagcagtttaacgtggtcgatctggatgaagagcgtacccgtatcagtacgctgttgcgtaaccggggatatttttacttccgtcccgattatatgacttatcaggcagatacaacattggttcccggtggacatatcagccttcgtctgattcccgttccgggattacccgctgcggcacaacgtccttactatgtaggagatgcttctgtttacctgtttggcaagaatggtgaggcgcccaatgacagcatgatgtataagaatctgaatatacattattataagaaattgcaggtacgtccgaatatgctttatcgttggttgaactatcaacagtttgtgcggaatgcacagatgcgggcttccaatcgcactcgtctttacagtcagtatcgacaggagcaggtgcaggagaaacttagccagttgggaatcttcagttatctggatttacaatatgctccgaaagatacgacagccgtttgtgatacgctgaacgtaaccatgcaggccacgtttgctaagccgctggacgccgaactggaattgaatgtcgtaaccaaaagtaacgaccaaaccggtcccggggcatcattcggcgtcacccggaacaatgtattcggaggtggcgagagctggaacgtgaagctgaaaggctcttatgaatggcaaaccggcggaggagaaaaaagctctttaatgaacagctgggagatgggagtttctacttctctgactttcccgcgcgtggttttcccgcattgggggaaaagggagtttgacttcccagctaccactacattccgtttatacatcgaccagttgaaccgtgccaggtattataaactattgtcattcggcggaaatgctacctacgatttccaaccgacacgtacaagccggcatagtatcacccctttcaaactgacattcaacgtcctgcaacaccaatcggaagagttcagggaaattgccgatgctaatcctgcattatatatcagtttgaaagaccagtttattcctgctatggaatatacctatacctatgataatgcttccgcacgcggtattaaaaatccgatttggtggcaatcgactgtaacctctgccggtaacctgacctcggtgatttaccgtgctttcggtcagtctttcagcaaagaggacaaacgtttgctgaacgtccctttcgcgcagtttgtgaaactgaatacggaatttcgccatttgtggaatatggacaagaataataagattgcttcccgtgtagctttgggtgctctcttcgcctacggtaatgcaacgatagccccttacagcgaacaattctatgtgggtggtgccaacagcatccgcgcttttacggtacgtagcatcggcccgggcggataccatccggcagaaagccgctactcttacctcgaccagacgggtactttccgttttgaggcaaatgtagaatatcgtttccgtatctttaagagcatttggggagccactttcctggatgcaggaaacgtctggttgatgcgcaaggatgaggcccgtcccaattcacaactcgaactgaaaacattcccgaaacagatcgctttgggcaccggtgtcggtattcgttatgatatggatattcttgtgttccgtcttgatttcggtattcctttgcatctgccttacgatacagaacgaagcggatattacaatgtcacaggatcctttatgaaaaatctgggaatacattttgctatcggttatcccttctaacgttctttctttgtcttgaaacaaagaaagaaccaaagaaaattcaaggctgcgtttttccggctactccggtgttctctccggctaaagggcagaaactcgcttcgctcaaacagtctgccctttttaacgctggagaaaacgcctgcgcttaacgccggaaaaacgaggccgatcccctttcggcgtgtttgctgcataggttaatgaattaccggatttcttgatttgtcattgatgtacttttgattctgcatgggtttacatgccgaaaggttttccgacctacttttttctccgttaagcgaacacccgtaacgaagcgttaaaaagggcagattgtttgagcgaagcgagtttctgccctttagcgtagtgaagggtgtgagtaggagaaaaaagtcagtcttgaatttttctttgtttctttcttttgtttcaagacaaaagaaagaaagtttttgtaaatttgcaacgaaatctgatgccgttgacatcactaaccttttaatattacacaatttatgaaaccaactttattcttattggcagccggtatgggtagccgttatggaggcttgaagcaattagacggactgggtcctaatggcgaaactattatggattactcaatctatgatgctatcaatgccggatttggcaaacttgtatttgtaatccgcaaagattttgaacaagatttccgtgataaaattatttccaaatacgaaggtcacattccttgcgaactggtatttcagtcaattgacgatcttccggaaggctttacttgcccggcagaccgtaccaaaccttggggtactaaccatgcagtaatgatgggtgctgatgtgattaaagaaccgtttgcagtgatcaactgcgatgacttctatggtcgtgattctttccaggtaatgggcaaattcctttctgctcttcctgaaaattcaaagaacgtttattcaatggtaggttttcgtgtaggaaatacattgagcgaaagcggtacggtatctcgtggtatctgtagtacagatgctaaaggattgttgacatctgtagtagaacgtacgaagattcaacgtctggacggtgaagtgaaatatatcggtgatgatggcgaatggacggctactcccgacacgactccggtaagtatgaacttctggggattcactcctgattacttcgcttacagccaggaattcttcaagactttccttagcgatccgaagaatatggaaaacctgaagagcgagttcttcatcccattgatggtagataaattgattaatgacggaactgccactgttgaagtactggatactaccagcaagtggttcggcgtcacttatccggaagaccgtcagagcgtagtagacaagattcaggcattggtagatgccggtgaatatcctgctaagttgttctaaagaagagccattgattaagataaagagcagtcattcataagaatgactgctttttttgtttttcataacgtatcatactaagtagtatctaataaatattcagtatctttgcagtccaaaatgttataaatcagaagcagaagtgatttcagtagaaggattatcagtagaatttaatgcgacgccgctttttgaggacgtcagctatgtaattaataagaaagaccgcattgcgctggtcggcaaaaatggtgccggcaaatcaaccatgctgaagatattggcaggtttgcagtcaccgacacgcggagtggtagctactccgaaagatgtaaccatcggatatttgccacaggtcatgattctttccgacaaccggacggtgatgggagaggcagaactggcattcgaacatatatttgagcttcaggcgaagttggaacggatgaatcaggaactggcggaacggacagactatgattcggaagaatatcatcagttgatagaccgtttcacgcatgaaaacgaccgcttcctgatgatgggcggtacgaactttcaggcggaaatcgaacggacacttcttggattgggattcagccgggaagattttgaacgccctacttcggagttttccggtggatggcgtatgcgtatcgaattggcaaaactgcttttacgacgcccggacgtgcttttgctcgatgagccgaccaatcaccttgatattgaaagtatccaatggttggaaaactttttgtctacacgtgccaatgcagtcgtattagtcagccatgaccgtgctttcctgaataacgtaactacccgcaccatcgaaattacttgcggtcagatttacgactacaaagtgaagtacgatgaatttgtagtcttgcgtaaagaacgccgtgagcaacagctccgtgcttacgaaaatcagcagaaacaaatacaagatacggaagattttattgaacgcttccgttataaagcaacgaaggccgtacaggtacaaagccgtatcaagcaactggaaaagatagaccgcatcgaagtggacgaggaagataattccgccttgcgtttaaaattccctccagccagtcgtagcggaaactatcctgtgatttgcgaagatgtgcgcaaagcgtatggcagccatgtcgttttccatgatgtcaacctgactatcaacaggggagagaaagtggctttcgtcggaaagaacggagagggtaagtctaccttggtgaaatgtatcatggacgaaattgatttcgaaggcaaactaacgatcggacataatgtacaaatcggttattttgcgcagaaccaggcacaaatgttggatgagaacctgactgtattcgatacgattgaccgagtagcgacaggagatatccgtctgaagatacgtgatatactgggagctttcatgtttggaggcgaagcttcggataaaaaggtgaaagtcctttccggaggagaacgtacgcgattggcgatgattaaacttctgctggaacccgtaaatctactgattctggacgaaccgaccaatcatttggatatgcgttcgaaagatgttttgaaggaagctatccgcgaatttgacggaacagtgattcttgtcagccacgaccgtgattttctggatggacttgcgactaaagtatatgagtttggcggtggacttgtaaaagaacaccttggaggtatctatgaattcttgcaaaagaaaaagatagatagcttgaacgagcttcagaaaggagcgggattgtcggcttctcccacggcttcagctaaaggtaatgaacctgaaaccgttcagccttcggagaataagctctcttacgaagcccagaaagaacttaataagaagattaagaaactcgaacgccaagtggcggactgcgaagcctcaatagaggaaaccgaatccgcgattgctatcgtagaagcgaagatggcaactcccgaaggagcttcggatatgcagctctatgaacggcatcaaaaactgaagcaacagttggatggcattgttgaagagtgggaacgggtttcgatggaactggaagaaacgaaaaattagaacaaaatgcatatttccgggcactatgtgagagaaacgttatacctcggtagaaggtattcctggcgggtatctgtttctcggtgtcgaaacaggtgtttctcgttgaggaacgaggcgttcctcggtgtcggtcaccttcttcctcggtgccggactgcgggtaggatgattgttgattagagagactatttaattatttatacaatatgaaagtaaccaagtatttaccaattcttgccgtatgccttatgacaacaggatgtaacagtaagaaagaggccgtgctgacgtccggtatcgaccttgctaatctggataccacggctatgccgggtacaagtttttatcaatatgcctgtggaggttgggtgaaagatcatccgctgacagacgagtattcacgtttcggtacattcgacatgttgcgcgaaaacagtcgtgaacaactgaaagcattgattgccgaattggcagcgaagaaagataacgcaccgggcagtgctgcgcagaaagtaggcgatctttataatatcgcaatggatagcgtgaagctgaaccaggaaggtgtagctccgatcaaagcagaactggcagccattgacgctctcaaggataaaggagaaatctatgcatatatcgccgagagccagaagaaaggcatccgtccttacttcaccatgttcgtaagtgcagatgatatgaacagttccatgaatatcgtacagacctatcaaggtggtatcggaatgggacagcgtgactattatctggagaatgacgagcagactaaaaatatccgtaataaatatcaggaacatatcgccaaaatgttccagttggcaggttatgatgaggctactgcacagaaagctgtgaaagcagtgatgaacatcgaaactcgcctggcgaaagcggctcgttcacaagtggaattgcgtgatcctcatgctaattataacaagatggatagggcgacgctgaaaaagaacttcccgacttttgactgggatacttatttcaccgtttccggtttgaaagatttggaagaagtgaacgtaggtcagcctgctgccatgaaggaagtagccgatgtgataaacaccgtatcactggacgatcagaaactgtatcttcaatggggattgatagatgctgccgcttcttatctaagcgatgattttgaagcacagaacttcgatttctacagcagaacaatgtctggaaagaaagaaatgcaacctcgctggaaacgttccgtgagcaccgtagatggcgttcttggcgaagtggtaggacagatgtatgtagagaagtacttcccggctgctgccaaagaacgtatggttacactggtgaagaacctgcaaacttctttgggagaacgtatcaaaggtttggaatggatgagtgaaccgaccaaggaaaaagcgttggagaaactggcaaccttccatgtaaaaataggttatcctgataaatggaaagattactccgcactggagatcaaagatgattcttactgggcaaatatcgagcgtgccaacgaatgggattacaacgaaatgattgccaaagccggcaaaccggtagacaaggatgaatggttgatgactcctcaaacagtgaacgcttattataacccgactaccaatgaaatctgcttcccggcagctatcctgcaacctccgttcttcgatatgaatgcggacgatgctatgaactacggtgcaatcggcgtggtaatcggccatgagatgactcatggatttgacgatcagggacgtcaatatgacaaagacggaaacctgaaagactggtggacagaagaagatgctaaaaagttcgaagaacgggcacgggtgatggttaacttctttgacagcatcgaagtagctccgggcgtacacgcaaacggtagcctgacacttggagagaacattgccgaccacggaggtttgcaagtttctttccaggcattcaagaatgcaacagaagccgcaccgctggaaattgttgacggatttactccggaacaacgtttcttcctggcttacgctaatgtgtgggcaggaaatatccgtccggaagaaattctccgattaaccaaacttgatcctcactcattaggcaaatggcgtgtggacggtgctcttcctcatatccagaattggtatgaagcattcaaaatcaccgaacaggattcgatgttcgtacctaaagaaaaacgagtatctatttggtaatagtttttgaatagagaacatatatgcgaagaggcgttgattttccgttgaggagagtcaacgcttttttttattaattcacaccttatttattacgtacgataaacaatatttcgtaactttgcacaccaaatacttaataagcaattcaatgtcagagtctaaaagaataaaaactgcattggtatctgtataccataaagaaggtttggatgaaattattaccaaacttcatgaagagggagtagagtttttgtcgacaggcggaactcgtcagtttattgaatcattgggatatccttgtaaggcagtggaagatttgaccacttatccttctattctcggtggtagagtaaagacattacatccgaaaattttcggaggtattctttgtcgtcgcggtctggaacaggatatgcaacagattgagaaatatgaaattcccgagatagatctggttattgttgatttgtatccgttcgaagctactgtagcttccggtgcatctgaagcagacattattgaaaaaatcgatataggcggaatctcactgattcgtgccgcagccaagaactataacgatgtaatcatcgtagcttctcaagctcaatacaaaccattattggatatgttgatggagcacggcgctacttcttcactcgaagaacgtcgctggatggctaaagaagcatttgccgtttcttctcactacgattcggctattttcaactatttcgatgccggcgaaggttctgctttccgttgctctgttaatagccagaagcaacttcgttacggtgagaacccacatcagaaaggttatttctacggaaatctggaagcaatgttcgaccagattcacggaaaagaaatctcttataacaatcttctcgacatcaacgcagccgttgacctgatcgacgaattcgatgacctcactttcgctatcctgaaacacaacaacgcttgcggattagcttcccgtgctacagttttggaagcttggaaagacgcattggccggtgatccggtttctgctttcggaggtgtattgattacgaatggtgtcatcgacaaagaagctgcagaagaaatcaacaagattttcttcgaagtgattatcgcgccggattatgatgtggatgcactcgaaatcctgggacagaaaaagaaccgcatcatcctcgttcgtaaggaagctaaattgcctaagaaacaattccgcgctttgctgaatggcgtattggtgcaggataaagatactaatattgaaacggtagccgacctgaaaactgtgacagacaaagctcctactccggaagaagtggaagatatgttgtttgccaacaaaattgtaaagaacagcaaatccaacgccatcgtattggcaaaggataaacaacttcttgcaagcggtgtaggacagacttcacgtgtagacgcattgaaacaagcaattgaaaaagccaaatcattcggcttcgacctgaatggtgcagtaatggcttccgatgccttcttcccgttccccgactgtgtggaaattgcagataaagaaggtattacggctgttatccaaccgggaggttcggtaaaagacgatttatcatttgcttattgcaatgagcacggtatggcgatggtgactaccggtatccgtcattttaaacactaatattaatgaagaatgaagaactaataatgaagaatgactgcacgtgacagcatcctcattcttaattcttcattcttaattcttcatttaaaaatatgggattattttcttttacacaagagatagcaatggacttgggcacagccaatactatcatcatcacgaacggaaaaatcgtggtggatgagccttcggttgtagctctggatcgccgtacagaaaagatgattgccgtgggggaaaaggcgaagttgatgcatgaaaaaacccacgaaaacatacgtaccatccgtccgttgagagacggagtgattgccgacttctatgcttgcgagcagatgatgcgcggtttgataaagcaggtgaatactcgcaaccatttgttttcaccttctcttcgcatggtgattggcgttccttcgggaagtacggaagttgaactccgtgctgtccgtgactctgcggaacatgccggcggtcgtgatgtttatttgattttcgaaccgatggctgcggcaatcggtatcggcatcgacgtggaagctccggaaggaaacatgattgtcgatataggtggtggatctacggaaattgctgttatctctttgggaggtatcgtttccaacaactccatccgcacagccggtgatgacctgacagaggatattcgcgaatatatgagccgtcagcacaatgtgaaagtcagcgagcgtatggcagaacgtatcaaaatcaatgtaggtgctgctttaaccgaactgggtgatgatgctccggaagattatatcgttcacgggccgaaccgtatcacagctcttccgatggaggtgcctgtatgctaccaggaagtagcccactgtctggagaaatcaatttcaaagatcgaaactgctatcttgagtgcattggaaaatacacctcctgaactgtatgctgatattgtgcacaatggtatctatctctccggaggtggtgcattgcttcgtggactggataagagattgaccgataagatcaacatacctttccatattgcggaagatcctttgcatgcagttgccaaaggtacaggagtggcattgaagaacgtagaccgtttctctttcttaatgagataaaccggggatgaggaatttattaaacttccttctgaaatacaattactggttcctcttcatcttattggaggtagccagttttgttttgttatttcggttcaaccgttatcaacagagtgcattcttcacttctgccaatacggttgtgggggcggtttatgaagtttcgggagggatttcctcttattttcatctgaaatcggtcaatgaagatctgctggaccggaacatggtgctcgaacaacagattactaatctggagaaagcattaaaagagcgtcagctcgattctatgaccatcaacagcatccggcaggtgccgcaagcggattatcagttgtttaaagcgcatgtgataaagaacagtttgaatctggttgataattatatcacgctcgataaaggttcctcttccggtattcgctccgaaatgggagtggtggatggtaatgggattgtagggattgtttatgaaacctctccttcctactcggtggtgatttcggtactgaacagcaagtcgaatatcagttgcaagattatcggcagtgattatttcggctacctgaaatgggaacatggagattcgcgctatgcttatctgaaagacttgcctcgtcatgcagagtttaatttgggagatacagtcgttaccagtggtttctccaccgtctttcccgaaggtataatggtggggacggtagatgatatgtccgactctaatgacggactttcctatctgttgaaaatcaagctggctactgatttcggtaagttgagtgacgttcgggtggtagcccggacaggtcaggaagaacagaagaaacttgaaaataaggtgatgaaagaatgattattacttatatacatagaatcggatggtttatcggcttggtacttcttcaggtgctaatccttaatagtgtacatattgccggctatgctactccttttctctatatctattttattctgaaattcagctccggcacttcccggaatgaactgatgttgtgggcttttttcttcgggctgaccattgatatattctccgatactccgggaatgaatgcggcggctactgtgctgctagcctttcttcgtccctctttacttcgtctgttcacgccccgtgataatccggatagctttattccctcttttaagacgatgggaatcagtcctttcttaaaatataccactgcaagtgtttttgtgcacagtctggcattactctccattgagttcttctcatttaccagcatttggctgttactgttgcgagtgcttctttgcactattctgactgtaacctgtatcatagctatagaagggattaagaagtaacgatggcaaaagattatatcttagagaagcgtaaatttgtaatcggaggcattgctatctccattgttttgatttatctgatacgtctttttgtattgcagatcacgaccgatgactacaagaagaatgctgacagtaacgcttttctgaataagatccaatacccctcgcgtggcgctatttatgaccggaccggtaaactgttggtattcaaccagccggcatacgacataacgatcgtgccaaaggaaatagagaatctggacacactcgatttatgccaatcgctgaatatcacccgtgcgcagtttctcaaaataatgagcgacatgaaagaccgtcgccgcaatccggggtattcccgctataccaaccagttgtttatgtcgcaactttcggcggaagaatgtggtgtctttcaggaaaagctgtttaagtttcgtggcttttatattcaacggcgtaccatccgtcaatattcgtacaatgctgccgcccatgctttgggagatatcggagaagtctccgcaaaagaaatggaagcggatgaagaaggatactacatccgtggggattatgtcggcaagttaggagtcgagaaatcgtatgaaaagtatctgcgtggcgagaaaggaattgagattctgcttcgcgatgcgcacggtcgtatccagggacattatatggatggtgaatatgaccgtccttccgttcccggcaagaacctgacattgagtttggatattgacttacagatgctgggcgaacgtttattaaagaataagattggaagcattgtggctattgaaccggagaccggagaaatcctttgtctggtatcctctcccaattatgacccgcatttgatgattgggcgccagcgtggcaagaaccatctggccttgcaacgtgatatgaccaaaccgcttttgaatcgtgccctgatgggagtgtatcctccgggatctacgttcaaaacagcgcaaggactgacgtttctgcaagaaggaatcatcaccgaacaaagtccggcattcccttgctcacatggattccattacggaagattgacagtaggctgtcatgctcacggatctcccttgccattgattccggctattgctacatcgtgcaactcctatttctgttggggattgttccgtatgtttggcgatcgtaaatacggttcgccacaaaacgccattacggtctggaaagaccacatggtttcgcaaggatttggctacaaactgggagttgatttgccgggagagaaacggggcttgattccgaatgcgcagttctacgataaagcctatcgcggacattggaacggactgacagtaatcagtatctctatcggacagggggaaattctatccactccccttcagattgctaacttgggagcaacgattgctaacagaggatactttgtgacaccgcatattgtaaaggaaatccaagataatcagttggacagcatctatcgcgtaccacgttataccactattgagaaaagacattatgaatcagtcgtagaagggatgcgtggcgcagccaccggaggaacttgccgtatgctgtcagtgatggttccggatttggaagcctgtggaaaaacgggtactgcgcagaaccgcggacacgaccactcggtatttatgggctttgcgccgatgaacaaaccgaagatagctattgccgtctatgtagagaacggcggatggggtgctacttacggagttcctttcggcgcactgatgatggaacagtatttgaaaggcaagctctcgccggagaacgagttgagggcggaagaatttagtaacagagtgatattatatggtaacgaggagcgatagtttgtggaaaacgctggactgggtaacgatttttatttacctgctcctgattgttggcggatggtttagcgtctgcggagccagctatgactatggcgaacgcgacttcctcgacttctcgacccgtgccggcaagcagtttgtatggattatctgttccttcggactcggattcgtgctgttgatgctggaagaccgtatgtatgatatgttcgcgtacattatatatgtggggatgattctcttgctcattgttaccatcttcatagcgccggacaccaaaggatcacgctcctggcttgtcatggggcctgtgagcctgcaacccgccgagtttgccaagttcgctacggctttggcgttggccaaatacatgaattcttattcattcagtatcaagaaagaaaagtgtgcctttatcctgggattcatcattcttctcccgatgttattgattatcgggcagcgggagacagggtctgcattggtttatcttgctttttttctggtgctttatcgtgaaggaatgccgggagtagtgctttttgcgggcgtatgtgcggtaatctactttgtggtcggcattcgttttgatgaagtctttatcgccgatactcctacaccactgggagaatttatcgtattactattgatcttattatttgccggtggtatggtgtgggtatatcgtaagaaatggtctgctacccgcaatatcattggtggaagtttggctatattactgattgcttatttaatatccgaatattgggtgcattttagcctcgtttgggtgcaatggacgctttgtattgtggtgataggctatctgatttatttggcattaagtgagcggcagcgtacttatttcctgattgccctgtttacaatcggttctgtcggcttcctgtattccagcaattatgtatttgataatgtgctcgaacctcaccagcaagtccgtatcaaagtagtgctcggtttggaagaagatttgaccggtgccggatacaacgtgaatcagtccaagattgccatcggttccggtgggttgacaggaaaagggttcctgaatggtacgcaaacaaaattaaagtacgtgcccgaacaggataccgactttatattctgtacagtgggtgaggaacaaggatttgtcggttcggctgctgtcttgttggctttcctgattttgatcttacgattaatcttcctgtccgagcggcagacttccaactttgggcgggtttatggatattcggtcgtcagtattttccttttccacttatttattaatatcggtatggtactggggttaactccggttatcggtattccattgcctttcttcagctatggaggttcttctttatggggatttacgatattgctgtttatcttcctgcgtattgatgcaggacgtggcagaagactttaatcttactgcttctcaatacggatacctacatcgctcaatccttgtaacttttcatctttcattccgctcataattttaatagtataatttgcaggatgtaaagggcgaacagatgtaataaaagtttccgattggtaaatgcttccccatccgtgtcccgtccatcttccggtagagtcagccaggcagaaagcaatggtatcagtgcgccataccgtagaatcctgtagattctgactgataaataaatggaggtcatgataaggatattcgatactgttgcggacttccgcaaaaaaccggagagtagtgggaacgctgtcagttatgggaatctgaaaagagagtgtatcactctttccccatcccttgttgggaagggattgataagagtgatacaccgtatgttcattgcaggctgtcagtaagcaagcgctgaatagactcaatatactattcttgagtaggcttttcattagttgactgtttctcctgattctgatttctttccggtctggaaggacgctcgtggttgggacgacgttcttgacgttcctgtccttgctgttcgcgttgacggtcttgttgttgcggacgttcctgattcgaccgttcctgtccttgtggacgttcctgatttgatcctctttccggacgtctgttttcgttgttccgtccctggttctgtcctctgttccggttgttgttattgttatttctcgggcggttttcattttcccgttgaggttgttgcggacgattgccgccttctgcttgctgttgcgggcggtttccgttattattgtttcctttcttcttctttttattattccggttagcattattgccgccctctttattattccggctgcggtcgaaacgggtaacactttcctgttccagcaagtcaacaggttttctcggttccggtttcttttcttcttcgagcaagctgtccggtttcatccctttcttattcatggagattacttcaaacgcacgtttgccgctgatggtgaccaggttggcagggaagtttttatccgtagaataagaaacctgattgcttagaatatctgctttgaagaaatagaaagtaccatccttcgtttccagttctatctctctcgaagggagacgtttttgagcttccacgtaacagtccacctcataattcaggcagcattttagcttggcacattgtccggcaagtttctgcggatttaatgagatgtcctgaaaacgggctgcactggtagaaacagagacgaagctcgtcatccacgtagcgcagcaaagttcgcgtccgcaagggccgataccgccgatgcgtcctgcttcctgacgggcaccgatttgtttcatttcgatacgtacgcggaatgcttcggccaatactttaatcagttgccggaagtctacccgctcatcggcgatatagtagaaaatagctttgttaccatccccctgatactccacatctccaattttcatatccagattgagattcaacgcaatctgacgcgcacgaatcatcgtagcgtgttctttggctttggcttcgttgaacttttccatatctaccggcttggctttccgatagacacgcttgatttccgcatctgctttgaagtttgctttcttcatttgcaggggaacgagtcggccggtcaatgtaaccacgccgatgtcatggccgggagccgcttcaacggcaactacatctcctttttccagtttaatcttgttgctgtttcgaaaatatcccttccgggtatttttgaattgcacttccaccatgtcactctcttccgcattgcccggaatgtccgccagccaatcgtaggtgttcagctttttatcttgtcgggagcatcctttgcagcaaaggccaccgcttccattatgaagtttatattccataagtttatatatttattattgcttcaacagtacaatcatcttcagcgagaagtcgaagaataccattttagcatttacattctgttctatatgtagttgcgcttcgcttaattcgtccatgatacccatcacattccgttcgttgacaaaaggcgcaaagcgggttgcaaaattctgttcattaatcgtcatatacgtcaaattgcgctggtgcaagttgaagataaaattctcccgaatcatgcgctggcaatattccaggaagttcttctgacgttcacgtcccatgcccgccacttgctcgctccacattttcatctccctgattttccgttggtaagacaaccgcatcaggctgacaaacaagtcaaaaaacaactggttctcttcattcagatgaattgtttcgagtgccttgataaaattcccgtttgccagatgggcaatggaaatactgtcggcaggcaaaatgttatatttcgtctgtaatacccggtcgatgctggcttcatcaatcttccgtacattcatgcgctgggtacggcttaggatagtaggcagaatcatatccggcgcttccgataccaataagaaaaccgttttttcgggcggttcctcaagcaacttcagcagtttgttggcacataccggatgcattttttccggcagccatacaatcgtaatcttaaatcccccttcactggatttcaaactaagttttttcagaatctcgtcactctctttggcatagatcaatgcttgtgagttctccgcatccatctctcctaaccagtgattgagattaaagtaaggatgattgataacaaacggtcgccagtcggctatataatcatcgcagacttcctttttcccctttgcgcttttcacgatagggaatacgaaatgtacgtcgggatgcaccaatttattgaatttcacgcaggacggacatgttccgcaggcatcagtctccccccgattagtgcaactgatgtaacgtgcgtatgcaatagccaacggcattttcccgaccccttccggtccgcaaataagctgggcatgtggaatacgcccctcattcacttcctgaatgagccgttgcttgatttcttcttgtccgattacgtctctgaaaaacatatcaataaatgattttggctacttctttgatactgtctactgctccgatagagtagaaatgaatacttggtactccatgagccatcaactccttgcactgggctacacaccattcgatacctacttgctcggcttccacgtcattcttgcatttcaaagcctctttcactaagtcttccggcaagtccactttgaaagtctttggaatcatgctcaattgagacagtttcttgaacggtttgattcccggaatgataggtatattgatacctgccgccttcgcctgctccacaaattcaaaatatttcctgttatcgtagaacaactgtgtcacggcatattccgccccgttctccacttttttcttcagccagtaaaggtcagtctcgatattaggcgcttcttcgtgcttctccggataacaagccaccccgtaagaaaatggcgtactgctgactttcatctccgaaccatccacaaaaatacctttattgaaattattgatttgctcctgcaactcgatagcatgatgataaccgtcaccttccggtgtaaataccgactcatgtttcgctttgtcaccacgcaacaccagtaattccgtgatattcagaaattgcaggtcgagcaacacatactcggtttcttcacgtgtgaatccgctgcacaaaatatgcgggactaccgtaatattgtatttgttctggatggcggcagccacggcaaccgttcccggacgtcttctcaagcggtttctctgaaacaatccgttaccgaggtctttatacacatattcgctgcggtgagtagtgatattgatatatttcgggtcaaattcccgaagcgtatcgattgtttgatataacttttctattcccgttcctttcagcggtggaagtatctcgaaagaaaaagcagttttcttgttgctatgtattaaatcaattactttcattctttttttgctaatgttcgttatctacttggattaaacgtgcatattgggacaaaaatacgaaaaaagaaagatttcttcttgatttactctaaaatagttttgtttttattgtactataatagataaaagagggaatatcccctgcaggatacaccctcttttgcctaattattatattagaatttacttgtcgaggaatgatttcttcattctggcgatgtccgtcagataatcttgtaaatcctgttcatgttcttcctcttcggcaagaatatgtttggcgatgtcgcaggtagtgaaatctttcccattggtaaaatctgcaatttcctgataacgaaggattgcgcagcgttcggaagctacattgtctttcagcaaactgacagagtcgaacccctgcggagcatcatatttgcatcttgccaactcaaaccattgcttagggtcgagcaccggaactccttccaactcaatgatacggtcagcgagcagttgcgcatgtctgcgctcttcttcggcatgttcctcaaattcaccctgtacatcggcacgcatggcaccttccactactaatgcacctacccaatattgatagtatgccaaccattcttcagctaatgctgcgttcaactgtgcgattaaactttctacatctagtttcccttgtagaatttttacactttctctagccataatttttatgtttaggttactatgtttaagttgtctatgtaacaggcaggggagatttttgtttatggctcattgagaatttaacagaaagatagctttacctacacataagtttgtaaagtgctgttttatctgccacctgcaacgaaattgaattatcttattgagaataactgtattacagcgttgcagatacctgttgcagatacgttgcagatgtagtatctgcaacgtatctgttggtcttataaaactcgtacaacatggtagacagtacctctgtgtacacgtttcgatgggatttcgtgtttacggagaactcgcccgaacacacttacccgcttgtttgataacggtatggcactgtttttctttatatcttccaaaatctccgccggtgagagccattcgccatcctctttctctttggccggacggaaataacggtaaaataactgttcttcgagtgaaacttgctcaaattcacggttgcttttggtcataatctgttcttcggactggtcgaaccagtaacgttcgccatgatcgagctcatacatggcctgcgtgtaaagctgttcataatctatcgccttgtttgtatctatcgttccggttacttcgatacagataaagcggcggctgcccgtagggtcggtcagcaagtctttttggttgctcgtcgcgatgaatgaagcataacggcgcatttcaagcacggcgtttccataaggtttgcgcatatttacaatcggtttttgcaggatatgtttcaggtatccttgttgggtggcgctgatctggtcgaactcgtcaatgttgatgagcgcaaaacgattgagatacaattcggcatccgcctttcgtgagaaatcgatgctgtccgtatagtatgcacgcatggcgggcgggatgaggctgcggcagaatgtcgatttacggcaaccttgcgggcctaccagcaggggcgaaacattattcgcatatttcttatctgtcccacgccagtgcatgaccatgttgagaaaccagcggtgaaacaagtctacccaatgcttgttttcgcagggaacggtttgcgccagtctgcggatacggtctttgccgtcccagatgggaagatggtagaggaaatcttccaacggattgaatacggggatgcggttggagtagatgtatcggcttatgtccctgtcccatagcggaatcccttcggcctgcgcatctagtgcgatactgttcagcacccgtttgttgataggattgaagtagaaatggaatgagttccgttcgcggtattccacttctcccacttgggtgttgtaacggaattcgtagcgcctgttcataaactcctctgtctggagtgacaggtactgttctttccctaagctgctcttctttccgaaccctttttgttcttcatatacattcttaatcagctggcggatgagcacctcttgccggcgcaggtaatagtggaaaatagtacgtttcaccgtttcctcttcgggaatgcccgaatggaagcagttgacagccagttgtgtcaccatagcctgaaagtcttcccctctttcgggtgcaccttcatcttccgcttcgtagatttcttcatgggtctttctcaaagctgcttcgaaaagcataaatacagcgcgctccgtgtcatatcccggtacggcccgtgtcaacggtgacttttccgagcgtactgcttcccgataggtcagttcttcgggcatccctgacggttgcgacagataaaacggaacggaatccggtctgtacataagttccgggtcgtatgacagccgtgagtactgttccagactaggctctttgggtaaaatgctgaacgggatttgcggctgatagcatttaacggccaaacgataggcatgtgcgtgaaatatctccgcttcttctcttttctgtggaagcgaattgtctgggcgggtaaatttcgcccatatttttactgtccgtccgctcgaaccggtaaaaacacagtgagtctgcggctgttcccatgctaattgttttaccaatgtaatctccgggccgcctgacaacggtccgacggtcagttctactattccgttataacttttcatttgttttccaccttcggccctgcggaattccgcagccggaagaatcttcggtagcttgtctgcttcgtagcagcgtgagtcgggcagggaatatcgcaacacttctctgaaggcggacacaggccgtgtctttgtttctgtccgtgtttttcctatccacgtttccatatccattgtagtcagcgcagtagttttgtccttgtctcttaattgagtaattttcatcttttgttttgttaataatattctgctaagttagtcatatttgtccgctcttgcaaataaacatggatattttatctgtttatcctttttatccgtacatttgtagaatttaataacaataaaaccgataaacagcaatgaaagaaccattcgattattccatcgttccttatactttagctacggtttcgctgtcgtttctctatatggaaactccagtgtctctagcgggaaacgctagtatctctggctggaaacgctcgtttccatgcgcggaaactgtagtttcccgcctgggaaccggagttctgacgctggaaacgagcgcttcaatgataggaaaataaactttgatgcttggtgtgcaatatttcttcttaccgctgtgttgcagatactttatctgcaacgtatctgcaacggtatctgcaacgctataattgtttatcagtcagtttattatttcgattttgttgcaggtggcagatgtttttttatttttcaaactttattgtagggaaaattagaggtaatagtggcttgaggaaaagaatcttttaaccttgcgtgagaaggagttctattaaaaatatatatctttgcaagacaggtgactggcgttaatttataaaagcagagattatgagcaataaaatttatcctatcggcattcagaattttgaaaagattcgtaatgacggttatttctatattgataaaacggcattaatgtatcaaatggtcaagaccggaagttattacttcttgagtcgtccgcgccgttttggaaagagtctgctcatttctaccttggaggcttatttccaagggaaaaaggaactgtttgaaggattggctgtggaaaagttggaaaaggattggataaagcatcctatactgcatctcgaccttaatattgagaagtatgacacgccggaaagtctggataaaatattgaatgataatcttgaatattgggaaagccaatacggcacccgtccgtctgaaacatccttttccctgcgctttgccggtatcattcagcgtgcttgcgaaaagacggggcaacgtgtagttattctggtagatgagtatgacaaacctatgctgcaagccatcggcaatgaagaacttcaaaagcaattccgaaataccctgaagccattttatggcgctttgaaaacgaaggacgggtatataaagttcgctctgctcaccggcgtgacaaagtttggcaaagtcagtgtattcagtgacttgaataatctggatgatatttcaatgtggaatgagtatgtcgaaatttgtggtgtcagcgagcgtgaaatccatgaaaatctggaagcggaactacatgaatttgcagcagcacgtggaataacgtatgataaactctgtgaagatttgagagagtgttatgatggctatcattttacgcacaattcaatcggcatgtacaacccgttcagtttgctgaacgctttcaagcgtaaagagtttggtagttattggtttgaaacgggtacgcctacctatttggtgaaattgctaaaaaaacatcattatgacctggagcggatggcacatgaagagaccgatgtccaagtgttgaacagtatagattctgaatccaccaatcccatcccggtaatttatcagagtggatatctcaccatcaaggggtatgatgaagaatttggaatgtatcgcttgggtttccccaatcgcgaagtggaagaaggttttatccgcttcctgcttcctttttatgcgaacgtaaacaaggtcgagtcgccttttgagattcagaagtttgtccgtgaagtgcgttccggtgattataactctttcttccgccgcctgcaaagtttctttgcagacactacttacgaagtgattcgggatcaggaactacattacgaaaatgttctttttatcgtttttaaactgctaggcttctacaccaaggtagagtatcatacgagtgaagggcgcattgatcttgtcttgcagactgataaatttatttatataatggaatttaaactgaatggcacagcagaagaggctttgcaacagattaacgataagcattatgctttacctttcgagacggatgggcgaaaactttttaaaataggagtaaattttagcgcagaaactcgtaatatcgaaaagtggatcgtggaatcttgaatgtatatagaatttctgttaggtataggaaaatagaacttacatttgggtatactatataataatgtataggtgttccatataaggatgtgtctatctgaaaaaatatactctatgacatcgttatcaatcaatgagttacaaaaaagtttcaagaaagaaccgaaaaatagtcagatatatttggatgttattgataagttatctacttttgcacccgctttgctagagagacagagcctaatgattgacattctgttacaagattaaggcatcagaaaataaaaacaaaaaaacttcgaaaaaagtttggaggttatctgaaaaagtccttatctttgcatccgctttcgcaaagaaagcaggcgcggcggaagccacgttagttctttgaaatattgataaacaatacaagtagtacaagtaaaaaatagaaccgtcaatacttgtcttattcagtagtgatacaattaagactaataggtatttgaataaggtcaataaatttacggcgtcctgaacagagcaaaaagatcatcctaatggatgataaaaaatacttttacaatgaagagtttgatcctggctcaggatgaacgctagctacaggcttaacacatgcaagtcgaggggcagcattttagtttgcttgcaaactgaagatggcgaccggcgcacgggtgagtaacacgtatccaacctgccgataactccgggatagcctttcgaaagaaagattaataccggatagcatacgaatatcgcatgatatttttattaaagaatttcggttatcgatggggatgcgttccattagtttgttggcggggtaacggcccaccaagacaacgatggataggggttctgagaggaaggtcccccacattggaactgagacacggtccaaactcctacgggaggcagcagtgaggaatattggtcaatgggcgagagcctgaaccagccaagtagcgtgaaggatgaaggctctatgggtcgtaaacttcttttatatgggaataaagtattccacgtgtggaattttgtatgtaccatatgaataaggatcggctaactccgtgccagcagccgcggtaatacggaggatccgagcgttatccggatttattgggtttaaagggagcgtaggtggattgttaagtcagttgtgaaagtttgcggctcaaccgtaaaattgcagttgaaactggcagtcttgagtacagtagaggtgggcggaattcgtggtgtagcggtgaaatgcttagatatcacgaagaactccgattgcgaaggcagctcactagactgtcactgacactgatgctcgaaagtgtgggtatcaaacaggattagataccctggtagtccacacagtaaacgatgaatactcgctgtttgcgatatacagtaagcggccaagcgaaagcattaagtattccacctggggagtacgccggcaacggtgaaactcaaaggaattgacgggggcccgcacaagcggaggaacatgtggtttaattcgatgatacgcgaggaaccttacccgggcttaaattgcaacagaatatattggaaacagtatagccgtaaggctgttgtgaaggtgctgcatggttgtcgtcagctcgtgccgtgaggtgtcggcttaagtgccataacgagcgcaacccttatctttagttactaacaggtcatgctgaggactctagagagactgccgtcgtaagatgtgaggaaggtggggatgacgtcaaatcagcacggcccttacgtccggggctacacacgtgttacaatggggggtacagaaggcggctacctggtgacaggatgctaatcccaaaaacctctctcagttcggatcgaagtctgcaacccgacttcgtgaagctggattcgctagtaatcgcgcatcagccatggcgcggtgaatacgttcccgggccttgtacacaccgcccgtcaagccatgaaagccgggggtacctgaagtacgtaaccgcaaggagcgtcctagggtaaaactggtaattggggctaagtcgtaacaaggtagccgtaccggaaggtgcggctggaacacctcctttctggagcgatgccgtaactgtcacaaaacgtggcagccactaaaagactttaaaggttctgttttttgtactactggtacttgtttatttataatatatagatcaaccatctatagaagtatagatagagataaacaagagaaaaaagaagccgagtctagacgaaaggtagacaaggttgaactagtcctatagctcagttggttagagcgctacactgataatgtagaggtcggcagttcaactctgcctgggactaccaagctcaagaatgaggaacagggaaagctaaaagctaaaaaacaaaattcttgaataacctcttgggggattagctcagctggctagagcatctgccttgcacgcagagggtcaacggttcgaatccgttattctccacgatctctgaaaaagagaaacgatctttgacatgatgtacaaaaagtaaaattttagtaagagctaaaagtatatatcaaaccgtacgtgttcgagtacgcaatattgatagaaggaagcaattccactaccaataccagtacgagaataaaacgtttgaaagaaagtaagcaagggcgcatggcggatgccttggctctcggaggcgatgaaggacgtgataagctgcgataagcttcgggcaggtgcaaataacctttgatccgaagatttccgaatgggacaacccgtcattctgaaggaatgacatcttgcatagcaagaggctaacgcagggaactgaaacatcttagtacctgtaggaaaagaaaataataatgattcccctagtagtggcgagcgaacggggattagcccaaaccaatgttgttacggcaatattggggttgtaggaccacgatgtcgcaagaaatttagtgagaagaaccctttggaaaatgggaccatagacggtgatagtccggtattcgaagctaaatgaagcgtagtggtatcctgagtagcgcgggacacgaggaatcttgcgtgaatctgccgggaccatccggtaaggctaaatactcccgagagaccgatagcgaaccagtactgtgaaggaaaggtgaaaagcacttcgaatagaagagtgaaatagtccctgaaaccgtgcgcctacaagcggtcggagctgcttcagcagtgacggcgtgccttttgcataatgaacctacgagttactttttccggcaaggttaaggatcttgagatccgcagccgaagcgaaagcgagtcttaacagggcgattagtcggaaggagtagacgcgaaaccaagtgatctacccttggtcaggttgaaggttaggtaacactaactggaggaccgaaccgataagcgttgaaaagcttccggatgaactgagggtgggggtgaaaggctaatcaaacttggagatagctcgtactccccgaaatgcatttaggtgcagccttgggaattactactgtgaggtagagcgactgataagatgcgagggcttcaccgcctatcaagtcttgataaactccgaatgcgcagtagttcgatcccaggagtgagggcatgggtgctaaggtccatgtcctaaaggagaagaatccggaccatcagctaaggtcccgaaataattgctaagttgaactaacgaagtcagattgctaagacagctaggatgttggcttggaagcagccattcatttaaagagtgcgtaacagctcactagtcgaggagtttggcgtggataataatcgggcattaagcaatttaccgaagctatgggatccgtaaggatcggtaggggagcattccactctgcgtcgaaggtgaagcgtgagctttgctggagcgtgtggaaaagcaaatgtaggtataagtaacgataaagggggtgagaaaccccctcgccgaaagactaaggtttcctgatcaacgctaatcggatcagggttagtcgggtcctaaggctcagccgaacggtgaggccgatggcagaacaggttaatattcctgtactaccttaaggagtgacgtggagacggaggagtgacagcgccgcggactgacggaatagtccgttgaagggtgtagatgttgattatcccaggcaaatccgggataagagtcgaacctgatagtataccaaattcttcggaataaggtaatagtgcgtgtaagcatactcccaagaaaatccgctaaacttaatctttaaggtacccgtaccgcaaacggacacacgtagtcgggttgaatatactaaggcgcttgagtgattcacggttaaggaactaggcaaattgaccctgtaacttcgggataaagggtcccaacgagagttgggcgcagagaataggtccaggcaactgtttaacaaaaacacagggctgtgccaaattgaaagattacgtatacagcctgacacctgcccggtgctggaaggttaagaggagatgtcatcgcaagagaagcattgaattgaagccccagtaaacggcggccgtaactataacggtcctaaggtagcgaaattccttgtcgggtaagttccgacctgcacgaatggtgtaatgatctggacactgtctcaaccgtgagctcagtgaaattgtagtatcggtgaagatgccgattacccgcgatgggacgaaaagaccccgtgaacctttactatagcttaacattgaatttgggtaattgatgtgtaggataggccggagactttgaatcaggtacgccagtatttgtggagtcgctgttgaaatacggccctttgattatttgagttctaactcgtagatgcgaggacactgtttggtgggtagtttgactggggtggtcgcctccaaaagtgtaacggaggcttctaaaggtgccctcaggacgattggtaaccgtccgtagagtgtaatggcataagggcgcttgactgggagacagacaagtcgatcaggtaggaaactagagcatagtgatccggtgtttccgcatggaagggacatcgctcaaaggataaaaggtactccggggataacaggctgatccctcccaagagctcatatcgacggaggggtttggcacctcgatgtcggctcgtcacatcctggggctggagaaggtcccaagggttgggctgttcgcccattaaagtggcacgcgagctgggttcagaacgtcgtgagacagttcggtctctatctatcgtgggcgtatgaaatttgcgtggctctgacactagtacgagaggaccgtgttggactgaccgctggtttaccagttgtgccgccaggtgcatcgctgggtatctaagtcgggattggataagtgctgaaagcatctaagtacgaagccagccacaagattagatttcttagggtcgttaaagacgatgacgttgataggatgcaggtgtaaaggtggtaacatcaaagccgagcattactaattgcccgttcactttctttcaaatatgtaccggttgggtatatacgtttagcggattactgatacagaaactggaaacagagaacagaaacatactagtaatgaacttgagattttacttttcatcatgtcataaccttattcaggtggttatagcacgagggttccacctcttcccattccgaacagagaagttaagcctcgtcacgccgatggtactgcgtaacagtgggagagtaggtagccgccgttttaaagaagcctcgcttgtctattgacgggcgaggctttctgttttttattactttggtatttataccaccctttttagcagatacaaacctcataatacctattaaaaaagtgaatatttactgataatttgtatgttatgaggatatttatttgtatctttgtcgcccgaattgtaagctaacgatttaaaaaagagagaagctttgggaaaatttgataaatacaaaattgacttgaaaggtatgcaagcagactctgctaagtatgagtttgtattggataacctttacttcgctcacattgatggtcctgaagttcagaaaggaaaggtcaatgttacattgactgtgaaaagaacctctcgtgctttcgaactgagtttccaaactgacggaatggtatgggtaccatgcgaccgttgtctggatgatatggagctacctatcagttcttctgataaactgatggtaaagtttggtcatgaatatgcagaagaaggtgacaacctgattgtgattcccgaggaagaaggggaaatcaacgttgcatggttcatgtatgaatttgttgcgctgtctattccgatgaagcatgtacatgctcccggtaagtgtaataaagcggtaactagtaaattgaacaagcatttgaaaacaaatgcgaatgaggatagcgatgatactttcgacacaggtggagatgacatcgtaattgaggaagaagtggaggaacaaattgatcctcgctggaatgaattaaaaaaaatattagataataattaaagttttaagaaaatggcacatcctaagagaagacaatcaagtacgagacaagcgaagagaagaactcatgataaggcagtagctcctacattggctatttgtccgaattgcggcgaatggcacgtttaccacactgtatgtggtgcttgtggctattacagaggtaagctcgctattgagaaagaagcagctgtataattagtacagttatactgaaaacagcctgagggtaaagctctccggctgctttaagtattatagtattgctaatttaaaataggtttgatggaaaaaataaatgcagtaatcacaggagtcggcgggtacgttcccgattatatcttaactaacgacgagatatcaaaaatggtggataccaacgacgaatggattatgactcgtatcggagtaaaggagagacatattctgaatgaggaaggattaggtagttcatacatggcacgcaaagctgccaaacagttgatgaagaaaactggtgctaatcctgatgacattgatttggttgttgtcgctaccactactcctgactatcacttcccttctacagcttctattctttgtgataaactcggactgaagaatgcatttgctttcgatttgcaagctgcttgtagcggtttcctgtatttaatggagacagctgctaatttcatccgttcgggaagatataagaaaattatcattgtcggtgccgataagatgtcgtcaatggttaactatacagatcgtgctacatgccctatctttggtgacggtgctgctgcctttatggtggaaccgactacggaagattacggaatcatggattcgatactgagaactgatggcaaaggattgcctttcctccacatgaaagctggtggttcggtttgtcctccgtcttatttcacagtagacaataaaatgcactatttgcaccaggaaggaagaacagtgtttaaatatgctgtatccaacatgtcggatgtatctgctgctattgcagaaaagaatggtctgacgaaagataatatcaactggattgttccgcatcaggcgaatgtccgcattatcgaagccgtggctcaccgtatggaggtgccaatggataaagtgttggtaaatattgagcattacggtaacaccagtgctgctactcttcctttgtgtatctgggattatgaagataaactcaagaaaggtgataatatcattttcactgcattcggtgccggatttacatggggcgcagtttacgtgaaatggggttatgacggaaaaaaggaatcgtaacgtaagttactgaactataacactcaaaaacgcatcctatttcgattcgatgcgtttttttgtctcaaccaataaaatgaagagaaatgcataaagcaggttttgtaaacattgtaggaaatccgaatgtcggaaaatcgacattgatgaatgtcttggtgggtgaacgtatttcgatcgctactttcaaggcgcagacaactcgtcaccggattatgggaatctataatacggatgaaatgcagattgttttttctgatactccgggagtattgaagcccaattataaactacaggagtcgatgctgaatttttctacttcggcattgacggatgcggatatcttgctttatgtgactgacgtggtggagacgccggataagaataatgagtttatggagaaggtacgccagatgacggtgcctgtgctcctgctcatcaataagatagatcttacagatcaggaaaaactggtaaagctggtggaagattggaaagaactgcttccccaagccgaaattattccgatttctgctacatcgaagttcaatgtggactatgtgatgaagcgaatcaaagaactgttgcccgattctcctccttattttggaaaggatcagtggacggacaagcctgcccgtttcttcgtgaatgagattatccgggaaaagattctgctctactacgacaaggagattccttattcggtggaagtggtcgtagaggagtttaaggaagagccgaagaagattcatattcgtgcggtgattaacgtggaacgtgattcgcagaaaggaattattatcggtaaacagggcaaggcgttgaagaaggtagctaccgaggctcgccgcgaactggaacgtttctttggaaagactattttcctcgaaacgtatgtgaaagtggataaggattggcgtagttcggataaggaactgcgtaattttggttatcagttagattaagagtattcatgcgactgtgatagtcgtgaaaaaaacaaggtattgaactatgggtaatttagttgcaattgtaggacgcccgaatgtgggcaagtctaccttatttaaccgtctgacgaagactcgtcaggctattgtgaatgaagaagcgggtacaacccgcgacagacaatatggcaagtccgagtggctgggccgtgagttctccgtggtggataccggcggatgggtggttaattcggatgatgtttttgaagaggaaatccgcaagcaggtattattggcagtggatgaagcggacgttattttgttcgttgtagatgtgatgaatggagtgaccgacctggatatgcaggtggcggctattctgcgtcgtgctaatagtccggtgattatggttgccaataaaacggacaatcatgatttacagtataacgctcccgagttttataaactgggattgggcgatccgtattgtgtttctgccatgacaggaagtggtacgggtgatttgatggatttgattgtcagcaatttcaagaaggagtcttctgaaatcctagatgatgatattcctcgttttgctgtggtaggacgcccgaatgcaggaaaatcttccattgtaaacgcgtttattggggaagaacgtaatatcgtgacagagattgcagggactacccgtgactcgatctacactcgttacaataaattcggatttgatttttacctggtagatacggcaggtatccgtaagaaaaacaaggtaaatgaagacttggaatattattcggtgattcgttcgattcgtgccatcgaaggttcggatgtttgtattctgatgttggatgcaacgaggggtgttgagagccaggacttgaatatcttttctctgattcagaagaaccagaaaggattggtagtcgtgattaataaatgggacttggtggaagataaatcagtgaaagtgcagaagacatttgaggaagctgtccgttcacgttttgctccgtttgtcgatttcccgatcatctttgcttctgcattgaccaaacaacgtattctgaaagtgctggaagaagcacgtaatgtatatgagaaccggacgacaaagattccgacagctcgtttgaatgaagaaatgcttccgctgatcgaggcttatccgcctccctcaaataaaggtaagtatatcaagattaaatacatcacacagttgccgaatacgcaagtgccttcatttgtctattttgccaacttgccgcagtatgtgaaggatccgtacaaacgtttcctcgaaaataagatgcgtgagaaatggaacctgacaggtactccggttaatatttatattcgacagaagtaaagttcaccacagattaacacagatttccgcagattaaaaataaaaaacgggctaatcaatttacaagttttgtatcatttgattagcccgtattctttatgaaatatctgtggaaatctgtgttaatctgtggtgaatctatttctccaactggaaatcttttctgcgtaaaacgaagctgttactcaagtatttttcacgcacaatctgattctccgataattcttccggtgttccctggaaaagaatctttccttcaaacagcagataggcgcggtcggtgatactaagtgtctcctgtacgttgtggtcggtaatcaggattccgatattcttgtctttcagcttccaaacaatttgctggatatcttctacggcaatcgggtctacaccggcaaaaggttcgtcaagcatgatgaatttggggtcgatggcaagacaacgggcaatctccgtacggcggcgttcacctccggacaattggttacctttgtttttgcgtaccttttgcagacggaattctgctatcaggctttcgagtttctccttttgatattctttgggcttgttagtcatttccagtacggcggcgatattatcttccacactcatctggcggaaaacggaagcttcctgtgcaaggtagccgattcccgtttgcgctcgtttgtaaaccggatatttggtaatctccaggtcgtcgaggaaaatacgtccttcattcggagtaatcagccctacggtcatatagaatgaagtcgtcttaccggcaccgttcggtcccagcaaacctacaatctcaccttgcttcacattgatggaaacgtggcttacaacggttcgtttaccgtacttcttaaccaggtcttccgtgcggagcaccatcttgctttcttccatattctagttattttgcggcaaatgtagtaaaaataagctgaaataatgtacatttgcagacaaatagtgtgagttatgataaaagcattgagaaccgtcgggagatatttcatgctgatgggacggactttttcccgtcccgaacgtatgcgtatgttcttccggcaataccttaacgagttggagcaactaggtgtgaactccatcggtatcgtgctgttgatttcgtttttcatcggcgcggttattaccatccagatcaagttgaatatcgaaagtccgtggatgcctcgctggacagtggggtatgtgacacgtgaaattatgttgctggaattttcttcctctatcatgtgtttgattcttgcgggaaaagtaggatcgaatatcgcttcggaattaggaacaatgcgggtgacgcagcagattgacgcgctcgaaattatgggtatcaattcggcaaactacctgattctgcctaagattacggcgatggtaactgtgattcctattttagtgacgttcagtatctttgccggaattatcggtgccttttgcacctgttggtttgctggggtgatgaatgcggtcgatctggaatatggattgcaatatatgtttgtggagtggtttatttgggccggtatcatcaaatccctcttttttgcgtttattattgcaagtgtgtctgctttcttcggatatacggtagatggtggatcgattgctgtgggaaaggcttctacggatgccgtagtatccagcagtgtattgattctgtttgcggacttgatattaactaaacttttgatgggatgattgagattaaaggactttataaatcatttgatgacaaaacggtattgagcgatatcaatgctagttttgaaaatggaaagacgaatttgattatcggtcagagtggctccggtaagacggtattgatgaagtgtattgtaggattgcttactccggagaagggggaagtcttatatgacggacgtaaccttgtcttgatggggaagaaggagaaaaagatgcttcgcaaggagatggggatgattttccagagtgcggctctgtttgactcgatgacggtgttggacaatgtgatgtttccgttgaatatgtttagcaatgatactttgcgtgagcgtaccaaacgggcgatgttctgcttggatcgtgtgaatctgggggaggcgaaagataagtttccgggagaaatcagtggggggatgcagaagcgtgtggctattgcacgtgcgattgccctgaatccgcaatatttgttttgcgatgaaccgaactcgggactcgatccgaaaacgtcattggtgattgatgatctgatccatgatattacgcaggaatataacatgacgaccattatcaatacgcatgatatgaattctgtattgggaattggcgagaaagtgatttatatttatgaaggacataaagagtgggaagggacaaaagatgatatctttacctctaccaacgaacgactgaataactttatctttgcttcagacttgctccgtaaggtgaaggacgtggaagtgcaaggaatggaagggtaataaaaaaacttctgtcatcgggtgacagaagtttctttttttcttagctatattagcgtcggcaattaagctctaggtctagcttctttaactaccattgtacggcccatgtattcagctccgttcaattcagcaatagcttttgcagctgcagcgtcgtcttccatttcgatgaaagcgaatcctttggatttaccggtttcacggtccataacaactttaactgatgatactgctccgtaatcttccatcacttgttgcagatctccttccttaacacggtagttaaggtttccaacataaatgttcataatgaaaatgataaaaaataaataaatgaataaaactctctggacagatggttactaataaaaagattaaaacgacagagagtttacaaatgcgtttcgtaacggaagtaaaaaccttgtaatcaaatcgagaaactaatggtccatcaatccgcagcaaagaaaagaataatttttggattaaccatctttttggaaggttaatttgcggattatcagaaaaaaaagttctttccttttctcttgaaagaaaagaaagaaccaaagaaaagttggagaaagccctcacgctcggtatcctcaagcgagcttgtggctacactcactaaatcgggcttttcaaggctgacttttttctcctactcgcttccttcactacgctaaagggcagaaactcgctacgctcaaacagtctgcccttcttaacgcttcgttacgggcgctcgcttgatggagaaaaaagtaggccgggggacctgcggcgtggtcgttgctgatggtttattgttgtttatatatgaggaattgatgaaataattaataaaagatgtgtgaaagatgggtggcgttgctgaaataaatctgcaatgtcttttgaaatttgaaagattagcactaattttgcaccctctttgagtatagaacaaagtataaatcaaataaataattgtcagaatgaacgtttcattacaaaacattgacaaagtaagcgcagagcttactgtaaagcttgagaaagcagattatcaggagaaagtagacaaagagttgaaatcactccgtcagaaggcacagattccgggattccgtaaaggtatggtgccgacaagtcttattaaaaagatgtatggtaaatcggtgattgcagaggttgtgaataaggcattgcaagaagctgtttacaattatattaaagataataaggtgaatatgttgggcgagccgttgcctaatgaagaaaagcagcagaatattgatttcgatacaatggaagagttcgaattcgtgttcgatatcgctttggcacctgaatttaaagcagaagtaagcgctaaagataaagtagattattattctatcgaagtttctgaagaaatgatcgacaaccaggtgaagatgtacactcaacgcactggtaagtatgataaggtagatgcttacgaagataatgatatgttgaaaggtctgctggcacagttggacgaagaaggcaatacaaaagaaggtggtattcaggtagaagctgctgtgttgatgcctgcttacatgaagaatgacgatcagaaagctatttttgctaacgcaaaagtaaatgatgtattggtgttcaatccgaatgttgcttatgacggacatgctgctgaactgggttctttgttgaagatcgacaaggaaatcgcgaaagacgttaagtctgacttcagcttccaggtagaagaaatcactcgttttgttccgggtgaattgacacaggaagtgttcgaccaggcatttggcgaaggtgttgtgaagactgaagaggaattccgcgctaagattaaagaagaaattgcagcaagatttgttgctgacagcgattataagttcctgatcgatattcgcaaagtgatgatggaaaaagtaggtaagttggaattctctgacgctctgctgaaacgtatcatgttgctgaataacgaagaaaagggcgaagaatatgttgctgaaaactatgataagagcatcgaggaactgacttggcacctgattaaggaacagttggttgaagcaaacgaaatcaaagtagaacaggaagatgttctgaagatggctagagaaacaacgaaggcacagtttgctcaatacggtatgttgtctatccctgatgatgtgcttgataactatgcacaggagatgttgaagaagaaagaaactatcaataatttggtaagtcgtgtggtagaagtgaagctggctgctgctctgaaagcgcaggttactttggaaaacaagaacgtttcaatcgaagaattcaataagatgtttgaataatcattcggttgaatagaatataaagtcacagaaacacagagtttttataaaattataactctgtgtttttttgtgtctctgtattctttttcgtttctttgtacttacgtttatttttaatttataagaaaggaacaattaacatggatgattttagaaaatacgcaaccaagcatttaggaatgaatggcatggtattggatgatgtgattaaatcgcaggccgggtatttgaatccctatattctggaagaaagacagttgaacgttactcaactcgacgttttctcccgtttgatgatggaccgcatcattttcctcggtacacaagtagatgactatacagcgaatacgcttcaggcacagttgctgtatctggattctgttgatccgggtaaggatatctctatctatatcaactctccgggcggaagtgtatacgccggactgggcatttatgatacgatgcagtttatttcaagtgatgttgctaccatctgtacaggtatggcagcttcaatggcggctgtactgcttgttgccggtgctgaaggcaaacgttctgcgttgcctcattcacgtgtgatgattcaccagccgatgggtggtgcgcaaggacaagcgtcggacattgaaatcacagctcgtgagattcagaaattgaagaaagaactttatacgatcatcgccgatcattcgcatactgatttcgataaggtatgggcggactctgaccgcgactactggatgacagctcaggaagcgaaagaatacggtatgattgatgaggtattgattaagaaataaaaatggctgattcaaagacaaagaaaaggtgtagcttctgtggacggtcggagaatgaagtcggattcctgattacgggaatgaacggctatatctgcgacagttgtgctacccaggcttatgagattactcaggaagcattgggcgaaggcaagaaaagcgcgggagctaccaaacttaatttaaaagaactgcccaaaccggtagaaatcaagaaattcctcgaccagtatgtgatcggacaggatgacgcaaaacgcttcctttccgtatcggtctataaccattataaacgtctgttgcaaaaagacagcggggatgatgtggagattgaaaagtcgaacattattatggtaggtagtaccggaaccggaaaaacgttgcttgcacgtacgattgccaagttgctgcacgtgccgtttaccattgtagacgctacggtgctgacagaggccggttatgtaggcgaagatatcgaaagtattttaacccgtttgcttcaggtggcagattataatgtacctgaagcggaacagggtattgtgtttatcgacgagatcgacaagattgcccgcaaaggagataacccttccatcactcgcgatgtgagcggtgaaggtgtacagcagggattgctgaaattactcgaaggttctgttgtgaacgtacctccccagggtggtcgtaagcatccggaccagaagatgattccggtaaataccaaaaatattctctttatctgtggcggcgctttcgatggtattgaaaagaagatcgcccaacggttgaatacacatgtcgtaggatatacggcgtcgcagaaaacagcgacggtggacaagaataacatgatgcagtatatcgctccgcaggatttgaagtcattcggactgattcccgaaattatcggtcgtcttccggtactgacctatttgaatccgttggatcgggatgcgcttcgtgctatcctcaccgaaccgaaaaactctatcatcaagcagtacatcaaactgtttgaaatggatggtatcaagctcacatttgaagatgctgtcttcgaatatatcgtcgataaggcagtagaatataagctgggtgcccgtggattgcgctctattgtggagacaatcatgatggatgtcatgtttgaaatcccttcagaggacaaaaaagagtataaggtgacgctggattatgcaaagatgcaactggaaaaagcgaatatggcacgactgcaaactgcttaaaatcagagagtaagactataaaagatgatcgtaactgtattttcttaaaaatattagtcgcattttgcttggtaattacgaagttgtttataactttgtttggctctcttgaaggagggagcctactaaagttaaaccatgaactgaataaaacaacctaagttaagatggcaaggaagattaatttaacagatgaactgaagaagtgtttcggatttaataagttcaagggaaaccaggaagcgatcattaacaacttgctcgatggtaaagatacctttgtactgatgcctaccggtggcgggaaatctttatgctatcagctaccttcgctcttgatggaaggtacggcaattgtaatttctccgcttattgcgttgatgaagaatcaagtggatgcaatgcgcaatttcagtgaagaagatggcgtcgcccattttatcaattcttcattaaacaaaggcgcgatagaccaagtgaggtcggacatccttgccggaaagacaaaattgctatatgtggcgccggaatcgctgacgaaagaagaaaatgtagaatttttgcgttcggtgaaaatttcgttctatgcagtggacgaagctcattgtatttctgaatggggacatgacttccgaccggaataccggcggattcgccctattatcaacgaaataggaaaggctccgttgattgcgttgaccgcaacagcgacaccaaaggtgcagcatgatatccagaaaaatctgggaatggtagatgctcaagttttcaaatcgtcgttcaaccgtccgaacctttattatgaggtacgcgcgaagaccgctaatattgacagggatattatcaagtttatcaaaaacaatccggaaaaatcgggcattatctattgccttagccggaaaaaagtagaggaacttgctgaaatccttcaggcaaacggtatcaatgcgcgtccttatcatgccgggatggattcgttggcgcggactaagaatcaggatgatttcctgatggaaaaagtggatgttattgtagcaactatcgctttcggtatgggaatcgacaagccggatgtaaggtttgtgattcactacgatattccaaagagtctggaagggtattaccaggagaccggacgtgccggtagagatggcggtgaaggtcagtgcataaccttttatacaaacaaagacttgcaaaaactggagaagttcatgcaaggaaaacctgtggcagagcaggaaattggcaagcagcttctgttggaaaccgctgcttatgccgaatcttccgtatgccggcgcaagacgttgctgcattatttcggtgaagaatatacggaagaaaattgtggaaattgtgacaactgtttaaaccctaaaaaacaagtggaggctcaagagttattgtgtgccgtgattgaagcgattatcgcggtgaaagaaaattttaaggcagattatattatagacatactacaaggtaaagaaacttccgaagtacaggcgcatttgcatgaagacctcgaagtcttcggctccggtatgggggaagaggataaaacatggaacgcagtgattcgtcaagcactgatcgcaggttacttgagcaaggatgtggaacattacggactcctgaaagtgacggaggaaggacacaagttcttgaagaagccgaagtcattcaagattaccgaagacaacgactttgaagagacagaagaagaagttccggcacgtggcggtggttcctgtgcggtagaccctgctctttattctatgttgaaggacttgcggaagaaactctcgaagaaactggaagtgccgccttatgtgatcttccaggatccgtctttggaagcgatggctaccatttatccggtgacattggatgaattgcagaatataccgggtgtaggagccggaaaagcaaagcgttacggtgaagagttctgtaaattaatcaaacgccactgtgaagagaatgaaatagaacgtcctgaagatttgcgggtacgtacggttgccaataaatcaaagatgaaagtggctatcattcaggcaattgaccgtaaagtggcgttagatgatatcgctctttccaaaggtatcgaatttggtgaactcctggatgaggtggaagctatcgtctattcgggaaccaaactgaatatcgattatttcctggaagaaatcatggatgaagatcacatgctcgatatctatgattatttcaaggaatctaccactgataagattgatgatgcgcttgatgaattaggcgatgacttcactgaagaggaagttcgcttggtacgtattaagttcatctctgaaatggccaattaaaaaagcgaaaaaaataagcgtgcaggtatgcagttttgaataaaaaccgtatatttgcacgcaataatttttaaacgcatagccctatgtcatttattgctgataagattgtaatggatgggttaacttacgacgacgtattgttgatccccgcttattctgaagttttaccgcgcactgtcgatctctcgactaagttttcaaaaaacattgagttaaaaattccttttgtgacggctgccatggatacggttaccgaagcgaaaatggctattgccattgctcgtgagggtggtatcggcgtgattcacaaaaatatgtctatcgaagaacaggcaagacaagttgctattgtaaagcgtgccgaaaatggtatgatttatgatcctgtaacgattaaaagaggttctactgtgcaggatgcactggacatcatggcggaatataaaatcggtggtatccctgtggtagatgatgaaggttatttggtgggtattgttaccaacagagatttgcgtttcgaaagagacatggctaaacatattgatcttgtcatgactccgaaagaaagattggtaactacaaaccagtctactgatctagaatctgctgcacagattcttcagaaacataagatcgagaaacttccgattgtcggaatggacggaaagttgatcggtcttgttacttataaagatattacaaaagcaaaagataaaccgatggcttgtaaagatgccaaaggccgtttgcgtgtagctgccggtgtaggtgtgactgccgatacgctggatcgtatgcaagcattggtagatgccggtgcggatgcaattgtgattgatacggctcacggacactctatgtttgtgattgaaaaactgaaagaagctaagaaacgcttcccgaacattgatatcgtagtgggtaatattgctaccggagaagctgcaaaagcgttggtagaagcaggagcggatgcagtgaaagtcggtatcggtccgggttctatctgtaccactcgtgtggttgccggtgtaggtgttccacagttgtctgctgtctatgatgtagcaaaagccttgaagggtacaggtattcccttgattgccgatggtggattgcgttattcgggcgatgtcgtgaaagcgttggctgccggtggatattgtgtaatgatcggatcgttggttgccggaacagaagagtctccgggcgacacaatcattttcaatggtcgtaaattcaaatcctatcgtggtatgggatcgttggaagcgatggagaacggttcgaaagaccgttacttccagagcggaactgctgatgtgaagaagctggttccggaaggaattgctgcccgtgttccttataaaggtacacttttcgaagttgtctatcagctgactggtggtttgcgtgcaggtatgggatactgtggcgctgctaacattgagaaacttcatgacgctaagtttacccgcattaccaatgcaggtgtaatggaaagtcatccgcacgatgtgacgattaccagtgaatcgcctaactatagccgtccggaataatagatagatacggtgaactattaacggtgaacggtgaacaggctgtataatcagcagggtgttcactgctcaccgtttgttgtttgaaaaataaaaattgatgatgaaaagaaacctgttgttgggatgtatttctctctttgtagtcgcggtctttgcacaggaagatccggtattgatgcgtgttaacggaagagagatactccgttcggaatttgaatatgcataccgccgttatgccgaacgttcaaatgccaggctttcgtccaaagagtatgcggcacttttcgctcaatcgaagttgaaagtggaagcagccagggctgccggacttgatacgacctctgcttttcgtaaacaacaggagaaatgccggaccgagttggtggaatcttatctgctagacaggcaagtgatggatagttgtgcccgtgctatctatcagaagatgggactgaaagcacgtagcggtagggtacaggtgatgcagattttcaaacgtttgccgcagacaattacttcccggcatttagaagaagaaaaaacgcggatggattctatataccaggcgatacagaatcagccggatttgaattttaaccgtttggtcgaaatatactcggatgataagcaaagtagatggatcgaatgtctggaaacaacgagcgagtttgagaatgttgctttctctctggcaaaaggtatggcatcgcagccctttttcactcctgaagggattcatatcttgaaagtgatggatcgggaggaaacagctgcttacgaaaatgtcagtgccaggttaatggaacggttacggcgcaaggagattttggacaaaggtacaggcgcggtgctcgaacgcttgaaaaaagcatggcagtatgctcccaatcaggcggcaatggaagaactgctggcgaaaggccgtacagaacaaaccctgtttacgattgacggacaagcatacaccggaactatgttcacgcattttgcctcttctcatcctcaagctgtcaaacggcagttggaaggatttatagctaagtcattgctggattatgaaagccggaatatcgataaaaagcatccggaaattccttatgccttgcgggaatctgatgaaaactatttggtggaagagataacacgtcagaaaatagatttgcccgcagctaatgactgggcgggattggctacttattttaaatttcattcgtcggattatcggtgggagagcccccggtatagaggagtcgtacttcattgcgttgataaaaagacggcaaagcaagccaaaaaaatgctgaagaaagtgccggaaaaagagtgggcggacaagcttcggcaaacttttaatacatccggggaggaaaagatacaagttgaacaaggaatttttgccgacggagacaataaatatatagataaactggtttttaagaagggtgattttgatcctttgatgtcttatccttttactattgtagtaggcgaaaaaatgaaaggtccggatgattatcgggaagtaattgatcgggttcgaaaggattatcgaagctatcttgacacgtgctggatgcgggaattgagtgagtccggtaaggttgaaataaaccaagaggttttaaaaacagttaataataactgatgtaaccgattattcactatcttcgtaccttaaataagtagattttagttgccgatgcgaatattagtcctcttactgattacccttcttggttgtggagcgtgcaaggaacagcacgaccacaaaggaaagactcctttggtagaggtggacggtaattttttatataaagaagatttgatgtccgtgcttccggtcggattgtcaaaagatgatagcattctcttcaccgagcactatattcgtagttgggcggaagagattttattgtatgagaaagctgcgaacaatatccccgataatgtggatgtagacaagctggtggagaattatcggaaagcgttgataatgcatacttatcagcaggagttgattagccagaagttggcgaatgatatttccgaacacgagatagcagagtattacggcaaaaacaaggaattgtttaaactggaaggtccgttgattaagggattgtttattaaagtgccgttgacagctccccagttgaacaatgtgcgcagatggtataagtcggaaaaacaggatgctatcgagagcctggaaaaatatagtttgcagaatgcggtgaaatatgaatatttctatgataaatgggtgtccgtgaccgatgtcctggacatgattccgttgaaagtagaggcaccggaagagtacgtaaacaaacaccgtcaggtagaattgaaagatacggcttattattatttcctgaatgtgagcgattatcgcggagttggtgaggagaaaccgtatgaatttgcccgctcggaagtgaaagacttactggtaaatcagaaacgggtgagctttatggaacaggtaaagaacgacttgtatcagcaggcggtaagtaagaagaagattatatatacctcaaatccgcaactaagcccttgaacgtccttattgcgtttacacgtcctctcattactgaatttgcagataatttgaacttgaagcacccacttctgcctacaatatccccttaccccacaatgtgacttgaggcaatacacaatatcattcccataagttgtaggcattatccaaaatcagtctggaaaacatctgcgtaagcattattacaggtatagatgttcagcacataccgccttgatgtcctgatccacttggctggtacagagataaacctgaagacaaacgcttttatgcgacttgttgcattgagcccgaacttctttacgtcaagtctttgaataatggccttgtaaaagttacggataagtgctgtaagaagaaggaacactgtgttctctgccatgaaggatttgggcaatctgtcccacccgaaaccattgttcatatcatcgaagatacgttcctttcctccacgaaggttatagaactcgacaatttctcttacggaagaatcatagtcgttagtcaggatacaacggtatgtgtattctccttcccaaaaatcctgcacaccatccatccgtttctgtctttgaatcacaagtcgatatgccttacctttccacttctcaacaaggatagagttcaattcaaactcaatgccattgatttcctcagttttccagcctttgagagcaaaggtgtcattgtagatcgaactgcagcggttagcacggatatagaaggacttgcagtgtttttctatttcctccacgatttcctcggaacatgatccacaatcagctctgaagcgattgatagtgagcccattctgttcaaatctcgcaaagaacctcttcagcgtgtccttctgatggaaacgaacatttgtgttaccatcgctattctctataccgactatcaaatcgccaataaccgccacgccagggcgataaccaaggaacttcttgtatgtaggctttgcatcatacttctctgtctctatgaactgatggtcgaaatcaacatcatacatctcaccctctttcagttggccagatgcaaatatacaattgagcaataaagtattgagagtgtcagccgtattgaaatcgtaggtcttgcccatatctgatgtgtatgaaatgttttcttgcgtcaactcctttatcgccctgaggatagtatcagagctacaagtgcgaagtgtcggatgaagcgagaggtggttcatcaaatgagtagtgacatcctcaatacatgaaccgctacagaagtagatactcatgagagaacggatgatttcgctgtactgataaccgaacgatctacaccttagaccgagggttgagtcgattacagatgataatgtggagtcaaattgctccatgattgaaaataatcccccaaaaggagtgagtctctcagatttaatttgtatcttcgccatgtctatcgtcggattctcttgttttttttgcaacactaagataagtgaaaattctgacatggcaaaatcctgagcaactttttgttgctcaggtacttaaaaagtttaatttataatagtgttgcggaattaaggatataattattaaatacaaagaatgaagaagtttgtgaactttagatttgttgttacccttgtcctggcaatatttgctaatgtggcaacctatgcacaagataatgtggttgatgaagtagtttgggtagtaggtgacgaagctattttaaaatcagatgtagaagaggcccgtatggatgccttgtataatggacgcagattcgaaggcgatccttattgtgtaattcctgaagagattgctgtgcagaagttattcctgcatcaggcaaagttggacagtatcgaggtttccgaagcggaaatcatccagcgtgtggatatgatgaccaatatgtacatccagcagatcggttccagagagaaaatggaggagtatttcaataaaacatccacccagattcgtgaaactttgcgtgataatgcacgtgacggattgacggttcagaagatgcagcagaaactggcaggagatatcaaagtgactccggcagaagtacgccgttacttcaaagatcttccacaggatagtatcccttacattcctacacaggtggaagtgcagattattactttgcaacccaaaatacccgtttcggaaatcgaggatgtaaagaggacactgcgtgattatacggatcgtgtgacaaaaggagaaatcgacttctctacattggcccgtttgtattctgaagataaggcttctgccattaaaggtggtgaatgtggatttatgggacgtggtatgatggaccccgcttatgcgaatgtggcattcagcttgcaggacccgaagaaagtttccaaaattgtagaatcggaatttggtttccatattatccagttgattgagaagcgtggtgaccgtgttaatacccgccatatcctgttgcgtccgaaagtctcggaaaaagaactgaccgaggcttgtgcccgtctggattctattgcagatgatattcgtgctaacaaattcacatttgatgatgccgctgccgttatctcacaagataaggatacccgcaacaatcacggtatcatggtgaacatcaatgaacattcaggtatcactacttctaagttccagatgcaggatcttcctcaagacgttgctaaggtagtggataagatgaatgttggcgagatttccaaagcttttacaatgattaatgagaaagatggaaaagaagtatgcgctatcgtgaaattgaaaactaaaatcaatggtcataaagcaaccatcgcggaagactatcaggatctgaaagaaatcgtaatggataagcgtcgcgaagaggtgttgcagaaatggattctgaacaagcaaaaacacacttatgtacgcatcaacgaaaactggcagaagtgtgacttcaagtatccgggttgggtcaagaatgactgatataaccttgctttgactttatatgctgaaaaagaataagaaaaataaacaacaagacaggcatagatggctccttataggctttctatgcctgtttggtgtatgtcttgtggcacaagtgaggccgacgggacagaaacccacggcagggacttcgacaaaatcgactgcggatacgtctaagacggctcccaaaaccaaaacgtcggcgggtaataagaaacaatcggacaacaagaagcaaccggagaataaaaagaccaaagtttacttgctccatgctgacgaaggacaggcggataagctggcacgtccggatgtgcaggtgttgattggtaacgtgaagttgcgccatgacagtatgtatatgtactgtgacagtgcactgatttttgagaaaaccaactccgtagaagccttcagcaatgtgcgtatggaacagggagataccttgttcatctatggtgattatctttattatgacggaatgacgcaaattgcgcaacttcgtgaaaacgtgaagatgattaaccggaacacgaccctgctgacggacagcttgaactacgaccgtctctacgatctcggatattatttcgaggggggaactttgatggatgaagagaatgtactgacttctgactggggcgaatatagccctgcaacaaaacagtcggtattcaaccatgatgtgaagttggtgaaccctaagtttgtgttgacctccgatacattgaggtataataccgaaaacaaaatagcagtgattctcggaccttccaatattgtcagtgataataatcatatctattcggaacggggattctataacacattgaccgaacaagcggaattgttggaccgttcggtcctgaccaatcaggggaagaaacttgtaggcgacagtctgttctatgaccgggtaatcggttacggagaagcattcgataatgtgaagatgacagactccatcaataagaatatgctgacgggcgattattgtttctataatgaattgacggactctgcgtttgcaacaaaacgtgctgttgctatcgattattcacagggagacagtctttatatgcatggggatactttgcagatggtgtcctataatctgaataccgattctttgtaccggttgatgaaggcttaccataaagtacgtatgtatcgtacagatgttcagggagtatgtgactcactggtctataattcgaaagattcttgtatgaccatgtatactgaccctattctttggaatgacggacagcaactgcttggtgagcagatcaagatttatatgaatgacagcacgattgactgggcgcacattatcaaccaggcgttgacagtggagatgaaagactctattcactataatcaagtgtccggcaaggagatgaaagcctatttcgttaatggagatatgcgccatattgaagtgatcggtaatgtgctgacagctttttatcctgaagagaaagacagtacgatgaccggatttaattgtctggaaggtagtatgctgcatctttatatgaaggataagagaatggaaaaaggactttttatcggtaaatccaacggaacgatgtatccgatggaccagataccgcctgataaactgcgtcttcccacttttgcctggttcgactatgtccgtccgctaaataaggacgatattttcaactggcgcagcaagcgtgcgggagaaacattgaagccgactaccgaccggcgaccaaagacagaaaagcgaaacttaataaatatgaagtagtatgggaatgtttaactcaatgagaaagccccggggctttaatcatcaatacatttatgtagacgagcggaaagaaaagctcgctaagatggaggagaacgccaaacgtgacttggggatgctgccggagaaagaatttaatccggaagatattcgcggtaaattcgtcgaaggtactacacatttgaaaagaagaaaagcaagtggccgcaaaccggtttctttcggaatcatactgataatcattgccttccttctctatctgtggcattatttagcaacaggaagctggagtttttaattgttaatttacgaagtatgagcgatatcattcatttgttacctgattcggtagctaaccagattgctgccggtgaagtgatacaacgtccggcatctgttatcaaggagctagtggagaatgcgattgatgcagatgcgcaaaatatacatgtgttagtgactgatgcgggtaaaacctgtattcaggtgattgatgatggaaaaggaatgtccgaaacggatgcccgtctctcttttgagcggcatgctacttccaagatacgggaagctgcggacttgtttgctttgcgtaccatgggatttcgtggggaagcattggcatccatcgcagcagtggcgcaggtagaactgaagacgcgtccggaatcggaagaactgggaacgaaactggtgattgcgggttctcaagtggagagccaggaggctatatcctgttctaaaggaagtaacttctctgtaaagaacctgttctttaatgtgcctgcccgtcgtaaatttttgaaggctaattccactgaattgagcaacatccttgccgaatttgagcgtatcgctttggtgcatccggaagttgccttttcgctttatagtaatgattcggaactgttcaatcttccggtatcacagttacgccagcgtattcttgctattttcggtaagaagctcaaccagcaattactgaatatagacgtgaacactaccatggtgaaaatctccggatacgtagccaaaccggagactgcccgtaagaaaggagcccatcagtatttctttgtcaacggacgttatatgcgccatccttattttcataaggcagtcatggaggcttatgagcagttgattcccgccggtgaacagatttcctattttatctattttgatgtagatccggctaatattgatgtgaatattcacccgacaaagaccgagatcaagtttgagaatgagcaggccatctggcagatactttcagcatccgttaaggaatcgttgggtaagttcagtgctatcccttccattgattttgatacggaggatatgcctgatattccggcatttgaggaaaagatatcttccgaacctccgaaggtacattataatacagattataatccgtttaaagtctctgccggtggcggtggtggcggatcgtatagtcgttcgaaagtagaatgggaggatttgtacggagggctgacaaaagccagtaagatgaataatccgcagccggaacccgaaatggattgggaggattcttctattggaggcgaaccggccttcgtggaagaaaagatagagacggtgacatccgccgcttcttctactttgtatgccaacgaaccggtgatggaaaaaggaaatcagcatttgcagtttaaagggcggtttattttgacttcagttaaatcgggtctgatgctaatcgatcaacaccgggcacatatacgggtgctttttgatcgctatatggtacagattcaacagaaacagggagtatctcaaggcgttctcttcccggaaatattacaattaccggcttcagaagctgctgttcttcaaagcattatggatgatttgtcggcagtcggcttcgatttgagcaatctgggaggcggtagctatgccatcaatggcatcccttcgggtattgaaggactgaatccggtcgaactggtgcgtaatatgctacatacagcgatggaaaaagggaatgacgttaaggaagaaatccaaaatattctggcattaacattggcgcgggcagcggctattgtctacggacaggtgttgagtaatgaagaaatggtaagccttgtagacaacctttttgcctgtccctcaccgaattacacacccgatgggaaaaccgttttgacaaccattaaggaggaggacatcgaaagattattcaaataaaacaaataaattcatcttttcctaaaaccttttagttcagttcgtgttatttaaatagttcaacaaagaaaaagatttaaataaccacttaactattaggtatatgaaaaagattctgatgttgctggcatttgccggcgttgcgtctgtcgcttctgcgcagcagacaatgactgtaactgaatacgaagtgattcaggtgcaagataaatatcaagtaataactaatcctttctggagtaactggttcttctctgtaggaggaggtgcccaggtattgtatggaaacaatgaccatatcggtaagttcagagatcgtgttgctcccacatttaacgtgtctgttggtaaatgggtaactccgggattcggattgcgtttgcagtacagcggattacaagccaaaggatttaccaccagcgaaaatgctaattatgtggttggcggtccgagagaagatggttcttacaaacaaagatgggactacatgaacttgcatggtgatttgatgattaacctgaatgcacttttcggtggatacaatccgaaccgtgtatatgaaattatcccttatattggtgccggttgggctcatgcttattctcgtcctcacactaactccgctactttcaatgcaggtattatcaaccgcttccgtttgtcgaatgctgttgacttgaatctggaattgagtgcaacaggtctggaaggcaagtttgacggagaacatggaggtaaacccgattatgatggtattttaggtgctaccatcggggtgacttattatttcccgactcgcggattccaacgtccggttccacagattatctctgaacttgaattaaaccagatgcgtaaccagatgaatgcaatggcagcagctaatatgcaattacaacagcagttggcaaatgcacaacaaccggttgaagtagaagatactgaagaagttgttataacagatactaatattgctccacgtactgtattcttcaagatcggttctgataaattgtctccgcaggaagaaatgaacttgtcatatcttgccagcaagataaaagaatctccgaacgctacatacacaatcaacggatatgcagactctgcaacaggtactccggctttcaaccagaagttgagtttggaacgtgcacaagttgttaaagacctgctcgttaagaagtatggcatctctgccgatagattgaaagttgcagccggtggtggtgttgacaaattcggtcaaccgattctgaaccgtgtagtattggtcgaatcagcacagtaatcatataatttcagtattcggcgattctttgtgatcgcctgctgaaagagagaaggcggctgaaagcgaatcctgaaataaggtattttcgctttcagctgccttttcttttcttattttaggaccattaatacttgcctgggcttttgattatgagtttgaggtatatggaagcgcttacactgattataaatgtaggttgttttaccttgaagaagcatagctttagggaacgtaaagcatagcttttgcctacctaaagctacgctttagagggggaataagaggtactccacacttcccctgcaaatagctattttttcaatcctcttcacctttcttctgaactctcgatgaataaactgtttgcgggtgaagggagggcttctcattaccgtattcatcacattacatatcgaaaaaatgtcattacagtgctttctaaaatcattgcattaattgtggcaaacactgcaatgttttttttaatcatcccaatgaaaaaaataatctattagcatatttgtttttgctattagcatcttccttttagctataatgatattctgattagctataatgaaattacatacaaagcaaagtgaaagggcttgaatctctgttaattcactcttgatttgaatcattcttactggaataatcgctctgtgtagcaatattttatatatttgtgatatggaactcaaatctaaaatattatggacgatataaataccgtatacgcactactcgttttaattatgttttttgttttattgagtaggctggataatcgttttgggaagatagaaagagaactgaacgagataaaaaaacggatggatgattatctcaaagttcagcaaagaggggttactgaaaaggtaaagcttgaaggagaagcattgaaaaaggaaaacgaagatatctctgcatcacctcaaataatagaaaaaacttcgacactagagactaaacagcaaaaagaaactgtaccgaaaaaacagaagccgtttgttgaaacagttatccgtgaggcactggaaggaacacgtgaaaagacggttgaaacagaactggaagatgtttgtgttgaggctgttccgaaacaaaagaaacaagtgaactatgagaagttcatcggtgagaatctcttcggaaagatcggtatcctaatattcgtcatcggtgtaggcttctttgtgaagtatgctattgataagaattggatcaatgagactttccgtaccgtacttggttttctgacgggagctgtattgctggtcgttgccgaacggttgcaaaagaagtatcgtacatttagctcgttgcttgcgggtggtgcttttgctgtattctatcttacggttgccattgcattccattattatcatatcttctcgcagactatggcgtttatcattctgataggcgtcactgtatttatgtctgttttgtctgtggtatacaatcggcgcgaactggccatcatttcacttgtcggaggatttcttgcacctttcatcgtaagcagtggagagggaagttatctggtactgttcacttatgtaagtatcctgaatctcggtatgttcggactttccatttataagaagtggggtgagcttccgatgatctcatttgtctttacctggctgataatgggaatctttcttttatttagctatacctccagttctacagttatttcggggcacttgtttttgtttaccactctgttttattttatctttctacttccggtgttctctattcttcgtggggaagatatgcgaacaatgagtcgggggctggtattcgtcattataacgaataactttatttatctgctttcgggagctttgttcttgcggaatatgggatggtctttcaaagcaagcggtttgttgagcctgttcattgctcttgttaatttaggactggtgctttggttatggaagagccggaaagactataaattcctggtgtataccactctggggcttgtgttgacatttgtctctattaccgttccgattcagttggatggaaactgtataacattagtttgggcgtcagaaatggtgttattattatggctttatatcaagtcgagaatccgggtatatgaatatgcggcaaagatactggtgggactcacctttatttcttacctgatggatatatataatgtagtaatgcatgagcatcatgctgtcagcactattttcctgaacagttcatttgccacctctttgtttgtagggctggctatgggagcatttgctctgttgatggggtattatagaccattcttctctacagcccgtcaactggaatatggtttctggaatcctttcatgctttttgtctctgtagccatactttattatacatttatgatggagtttcacctgcattttgagggagctacgaggagcggagcaatgttcttgtttactgccattgccatttcgagtgtttgttattcttttagaaaacgattcccgatcacccaatgtctgactttctatatgttagctattgggataaatacgcttgtatatatcataaatatatggggagatcaatgggagaacatggcttttgtgcctgttgtactacgatggttcacggcagcatttgtaatagcgaatatatgctatgtggcacgccaatactatctattaatcggcatcaagagtcgtttcactatttatctcaatattctggtcactcttctttgggtgacaatggtacgctctttcctctggcaggtaggagtggatgatttcagtgccggactttcgctttcattaagtattgccggatttgttcagatgggactagggatgcgtttgcatcagaaagtcatgcgcatgataagcctttcgacttttggaatcgttctgcttaaacttgtatttgatgatttgtgggcaatgcctactatcggtaagatcattgtattcatcattctcggactgatattactgatactttcattcctttatcagaaattaaaggatgtattattcaagaatgatgaagatgaagttagctaaatcttaaattatatattataataaaggctgccattctttcttagagtaggcagcctttactttatatgatacgtttttatgcaaacttccttattcctgtgagaaacgttttacctgttcctcgattaactccttgtcatcgaaataattaatcttcattgcttttttcacatctgccaaagtctcggcagcagcagctctggctacttcgcatccttgctgaagcatgtcatagatagccggaatatctttgctgaactctttacgacgattacgaatcggttcgagtatttcttgcataatagaattcaggaaacgtttcacttttacgtcgcccagtccgccgcgttgataatgtgctttcaattctgccagattcggataatccggtaagtagcgttcgaaatgttcggggaggcagaaggcgtcaaggtaagtgaatacggtgttaccttcaatctttcccgggtcttgtacacggagatgtcccggatcggtatacatactcatgatcttcttctggatttcttccggttcttccgaaaggtagatacagtttccgagtgatttactcattttagctttaccgtcagttcccggaagacgcaggcaggctgcattgtccggcaacaggatttccggttctaccaatgtctcaccatatatatagttgaaacggcgaacgatttcacgagcctgttcaagcattggttcctggtcttcacccacagggacagttgttgcacggaatgctgtgatgtccgctgcctggctgataggataagtgaagaaacctacaggaatacttgcttcaaagttgcgcatctggatttccgatttcacagtcgggttacgttgcaggcgagatacgcttacaaggtccatataatagaaactaagctcgcataattccggaatttgcgactgtatgaagatggtagctttagacggatctatgccacaagccagatagtcaagggctacttcaattacattctgacgcaccttctccggattgtctatattgtctgtcaatgcctgcgaatcggcaatgaagataaacatcttgctataatcacctgcgttttgcaggtcaactctgcgtttcaacgagcctacatagtgaccgatatgaagtcttccggtaggacggtcgcccgtcaatatgattttttcttttcccatattttattaccttattatataatggcgacaaagataaggataaaaactgaaagatacatcaaaatgtagttacttcatgatttgtgcttactatgataaaaaagtattcattaaaaagctaacggaaaaaacaaccgtttcattgacgcggtaaactatttcagtaaaaaatgaacgtttctttttgtcatttgcaaaatatgtcgttactttgcacaaattttgatattaacaatgaatcaacaggaaatcagaagtaagtattatctacattcggatgttttgcacccggaaacggcagacttcttctcttttctccaaaaacgatattttagttctttggtaatgcgttaatccttttttgagggtaacgcattttttttatggacgaacttagaaataacaacttattataacaacaaaagaaatggaaaaggaaatcaagaaagttctcgttttgggttctggagcactcaaaatcggacaagccggagagttcgactactctggttcacaagcactgaaagctttgaaagaagaaggtatcagctcagtattggtaaacccgaacatcgcaaccattcagacttctgaaggtattgccgataaagtgtatttccttcccgtaaatacttattttgtagaagaaattatcaagaaagaacgtcctgatggtatcttgctggcattcggcggacagactgcgttgaactgcggtgcggaactctacacacagggtattcttgataaatacggagtaaaggtgcttggtacatcggtagaagctatcatgtatacagaagaccgtgatttgttcgtgaagaaactgaacgaaatcgagatgaagactccggttagccaggcagtagaaaacatggaagatgccattgctgctgcacgcagaatcggttatcctgtcatggtacgttctgcttatgcattgggtggtcttggtagcggtatctgtgccgacgaagaagaattcctgaaattggctgaaagctcctttgctttctctaaacagattctggtagaagaatcgttgaaaggctggaaagaaatcgaatttgaagtgatccgtgacgctaacgaccattgcttcacagtagccagcatggaaaactttgacccgctgggtatccataccggtgaatccatcgtagtggctcctacctgttcactggatgataaagaattgactctgttgaaggaactttctactaaatgtatccgtcacctcggtatcgtgggtgagtgtaacattcagtatgctttcaactctgatacggacgactaccgtgtgattgaagtaaatgcccgtttgagccgttcttctgcattggcgtctaaagctaccggttatccgttggcattcgttgctgctaaagtagcactcggctatacactcgaccagattggtgagatggggactccgaattctgcatacgtagctccgcaacttgactactatatctgtaaaatccctcgttgggacttgacgaagtttgccggtgtatcccgtgaaatcggttcaagcatgaaatcggtaggtgaaatcatgtctatcggtcgctcttttgaagaaatcatccagaaaggtcttcgtatgatcggtcagggtatgcatggtttcgtaggtaatgacgaactgcactttgacgatttggataaagaactttcccgtccgactgacttgcgtatcttctctatcgcacaagcaatggaagaaggttataccatcgaacgtattcatgacctgactaagatcgatccctggttccttggcaaactgaaaaatatcgtagactacaaagcgaaactgtctacctataataaggtagaagatatacctgccgatgtaatgcgtgaagctaaagtgttaggtttctccgacttccagatcgcccgtttcgtactgaatccaaccggaaacatggagaaagaaaacctggcagtgcgtgctcatcgtaaatctatgggtatcctcccggctgtaaaacgtattaatacagttgcttccgaacatccggaactgactaactatctgtatatgacttatgcagtggaaggttatgatgtaaactattataagaatgaaaaatcagtagtcgtactgggttcgggtgcttaccgtatcggtagctctgtagaatttgactggtgttcggtaaatgccgttcagacagcccgcaaattgggttacaaatctatcatgattaactacaaccctgaaacggtttctactgactatgatatgtgcgaccgtctgtacttcgacgagctttcgttcgaacgtgtactcgacgtaatcgatctggaacaacctcgcggtgtgattgtctctgtaggtggacagattccgaacaacctggctatgaaactttaccgccagtcggttcctgtattgggtacttctccgatctctatcgaccgtgctgaaaaccgtaacaagttctctgctatgcttgaccaactgggtatcgaccagccggcatggatggaacttaccagtctcgaagaggtgaaaggattcgtagaaaaagtaggctatccggtattggttcgtccttcttacgttctttcgggagctgctatgaatgtttgctacgatgacgaagaattggaaaacttcctgaagatggctgccgaagtttctaaagaatacccggtagttgtttctcaattccttgaaaatacaaaagaaattgaatttgatgctgttgcccagaatggtgaagtggtggaatacgcaatttctgaacatgtggaatttgccggtgttcactccggtgacgctacactggtattcccggcacagaagatttactttgcaacggcacgccgtatcaagaaaatcagccgtcagattgctaaagaacttaatatctccggtccgttcaatatccagttcctggctcgtaacaacgaagtgaaagtaatcgaatgtaacttgcgtgcttctcgtagtttcccgtttgtttctaaagtactgaaacgtaacttcatcgaaacagctacccgcatcatgttggatgctccgtactcacgtccggataaatctgcatttgatatcgactggattggtgtaaaagcatctcagttctctttctctcgtctgcacaaggctgacccggtattgggtgtggatatgtcttctacaggtgaagttggatgtatcggtgatgatttctctgaagcattgctgaatgcaatgatcgctaccggattcaagattcctgaaagagcagtaatgttctcttccggtgctatgaagtcgaaagtggatttgctggatgccagccgtatgctgtttgctaagggatatcagatttatgctactgccggaactgctgcattcctgaatgctcatggagtagacgcgactccggtttactggccggatgagaaaccaggtgcagggaataatgtaatgaagatgatcgctgaccataagtttgacctgatcgtaaacattccgaagaatcatagcaaacgtgaattaacgaatggctatcgtatccgtcgtggtgcaatcgatcacaacattccattgattacaaatgctcgtctggcaagtgcctttatcgaagcattctgtgaattgaaattgggtgatattcagatcaagagctggcaggaatataaataaactgctttagctgtttatcaaaataaaaagaactccctctttggaatgccaaagggggagttttttgtttaagttgtcttgttgcgaatagatgttttctgttatttgcttacacgataattgtgtactttcagattctctatccggctattgaagtttccggctttctcgagcgggaaaaccaatgtgcgtatataactcatagaatcttttcctgcattgaaataacatttctgtatgttcatttcttcaacaacctttccgtttactctgagtgtggtactacgatgatcgccttcaatctgaatggtcgctttctctcccggattcactttatatgggaacgtattcaaataaccatcgcgtgcaaaacccatcatccctcgaattggatctgctagatagaatacggcattgggtgaacggaacaattctgttccgcttttctctggtgctccggtaatgtcgaagctgactgtataattatagccgatttccgggtaagtggaagtgctgccgggagcaacgctagaacgctcatataccaatgccggactcttgccgattcttcccaattgattgactccgggggcttcactgatagcactacgcttttcattatacacttcgaatggcagactggtttctttccctgtccatgtctttactgctagagtttgtaacgcagggaatacacggtgatgaatgtctttcacggaaattccattacctgcatggtcgttccagatggcaaacatgccaccgagaatagcagggtgcttttcttcgaatacggctttcccgatatgtgccggtgtccattctttatataaaaatacctcgttaagataatcctgatagtaaccggctaatggaacaatgtaaaccattgcatccggaatgctgattagctggtagccgtcttttatcatggttgctgggtcggcatatccgttataccaggcattcataatgatattttctgatttgacaggggtgtctcctttagcatgagtgagagcgccccatatcacggcttgtttgccaaagccttctaccagccggatataatggtcggtgaaagcccggaatttttctactacctctttcttggcattcgagtattcgtcggtaccgatatgcacacgcttgcccacgaatacagggtcgtcacctttcaggtattctttgaacagatcgtctgcaaattgataggtttccggtttgaataagtcaagatgatccattccgtactccttgctcccaatttccggtttgtaatgagtgaatgctaatgaatgtgccggaatatcaatttccggtataatctctacaaagttggttgcagcttgtttttgaaaatcaataaattcttttttagaataagaaccgtcgcgggctgtgagtcccggataagtttcggactccagacggaaagcagcataagtcttgtcccagttgttatcaaaatattgcttgaatccattatcattcagatggacttgcagggtattcatcttgtaataagccattatttttaccagatcctgaagatagctcatcggaataaatttacgaccgcagtctatcatgaatccccggatggagtagtcggggtagtcgcggattattcctttaggaaatgagtgctcctggctttgttctgctatttgcaagagggtacgtgtgctccagtaaagccctgtcagggtgggggcagaagtcgtgatccgatcggtaatcttgatttcatagccctcttctcccagctttttgtcagctgacagtgataggatgaagtctccgggtgtggctttgccttgagttacgcttaatgtttttccgaacatttgctgataatcgtcggcaaacatttgggctattctctgcaattctggatttgcagaggtgcatactatcttcgcatttgttcccggagtgaaattaccatcttttcctgtccattgtttgagttcggggacaacaaaaggtttagagtttacgctggcataggataaactgccatacaaacagaagattgtcaataagcataacactttcagggggattagtgtgtatgtcataatgggggtgtttttgttattaataaatgattaaagttaattattggctgaatttagggataatctgtctattagccagcaagagaagcgatttattttttatttttgtttttcgaaaagataaaatcagatttaacaatgttagtacttctatcttgtgccaagactatgagtgaaacttcaaaggtgaaagttcctttgaaaacggttccacgatttcaaaaagaagcttccgggattgctttgcagatgtcacagttttcggtggacgaactggaacgcctgttgcgtgtgaatgctaaaatagctgtggaaaattacaagcgttatcaggcttttcatgcggagggtacaccggaactgcctgctttattggcttataccggaattgtgttcaaacggttgaatgcaaaagatttctcgaaagtagaatttgaatatgcgcaggaacacttgcggctgacttctttttgttatggactgttgaggcctttggacgttattcgttcctatcggttggaaggagatgtagtgctgcctgaaccgggtaatcagacgatgttttcttattggcagtcccgtttgacggatgtgttcattgaagacatcaagaaagccggcggcatactttgcaatttggccagtgacgagatgaaaagcttgtttgattggaagcgggtggaaaaagaggtgcatgtcatcactcccgaatttcaagtatggaagaatggaaaattggcttcgatagtaatatatatcaaaatgtcccgtggtgaaatgacacggttcattctgaagaatcgaattgaaaatccggaggatctgaaaagcttctcttgggaagggtttgaatttaacgaatctctttcgaacgaaaagaagtttgtatttactaacggcaaagaaatataaggtatgacggaagttgagaagatgcgtagtagccagttggctgatatgtctgcaccggagttgcaggtacgttttgaacatgccaaaaaactattggcacgtatgcggggaatgagtacgtacgatgagggttatagagaattattggataagttggtaccggggattcctgaaacttccattatatgcccgcctttccattgcgatcacggagacggaatcaagttgggtgaacatgtgtttgttaatgccaattgcactttcctggatggaggatatatcacaattggtactcatacactggtcggtccttgtgtgcagatttatacgcctcatcatccgatggattatcaggaaagaagaggctctaaggaatatgcttatccggtgacgattggcgaagactgctggattggtggcggcgctattatctgtcccggtgtgacgattggtaatcgttgtgtgataggagcggggagtgttgtgacgaaagatattcccgacgacagtgttgcagtcgggaatccggcacgggtgattcgtaaataagttgctttatctggtagacagactggacgaagtgaaagttgtgagaaaaaaaacttttttgtattatttgttgataatcagagcttttctttattgcgcaaaaactttcttgaaaaataatacatgaaatgtttgcagaattcaaaaaatgccgtacctttgcatcgcttttgaaacggaagtgtacgggcgtttagctcagctggttcagagcatctgccttacaagcagagggtcggcggttcgaatccgtcaacgcccacacaaaaaaaacgaaacacttccggctcattaacaagggcgtttagctcagctggttcagagcatctgccttacaagcagagggtcggcggttcgaatccgtcaacgcccactataaaacagagtcttacgaagaaattcgtgaggctttttttatttcttaccgcttttatacaaactttctctatccttttgctctataactcaggaaaaagagttaattttgcagtctgataattatctaagaaaacgtatggaacttgatgtattaacggccatatctccgattgatggtcgatatagaggcaaaactaaagctttggcagcttatttctctgaatttgcactgattaaataccgtgtacaggtagaggtggaatactttatcaccttgtgcgaactccctttgccgcaattaaaaggaatcgatagcaatgtgtacgaaactttacggaatatctaccgtaacttctctgaagcagacgcacagcgcattaaagatatcgaaagtgtaactaaccacgacgtgaaagctgtagaatacttcctgaaagaagaatttgacaagatgggcggaatggatgactacaaagagtttatccacttcggattgacttctcaggatattaacaatacgtctgttcctctttctatcaaagaagcattggaacaggtttactatccgttgattgaagaactgattgcacagttgaagacttatgcaacagaatgggctaacattccaatgcttgccaaaactcacggtcaaccggcttctcctactcgtttaggcaaggaagtgatggtattcgtttaccgtctcgaacgtcagctggctatgctgaaggcatgtccgattaccgctaagtttggtggtgctaccggaaattacaatgcgcatcatgtagcttatcctcaatatgactggaaacaattcggtaatcggtttgttgcagagaaactgggattggagcgcgaagaatatacaacgcagatttcgaactatgataacctttctgctgtttttgatagtatgaagcgtatcaatacgattatggtcgatatgaatcgtgacttctggcagtacatctctatggagtacttcaagcagaagatcaaagccggagaagtgggttcgagtgccatgccgcataaagtgaatccgattgactttgaaaatgcggaaggtaacctgggtatagcaacgtctatcctggaacatttggctgtgaaacttcctgtttcccgtttgcagcgcgacttgacagactcgacagtgctgcgtaatgtaggtgtgcctttcggtcatatcgtgattgctattcagagttctttgaagggattgcgtaaactgttgctgaacgaaccagctatctatcgtgacttggataactgttggagcgtagtggcagaagctattcaaactattctgcgccgtgaggcttatccgcatccgtatgaagctttgaaagcgttaacccgcaccaaccaagctattacagaaagttctattaaagagtttatcgaagaattgaatgtaagcgaagatattaaaaaagagttaagagcaatcactccccatacatatacggggctttaattgtttacttatataataaacgtgttttttaaataggccgtgaggccaaagtctaattttattcgaataaaaaaatgagcacagaaaacgaagaatggcgcgaaaattctttcaatgaagagaatacaggtgccggccgtgatggtaacaggtcttacaacagagaaggtggagaacgtccgtatcgcccttcttacaaccgtgaaggcggggatcgtccgtatcgcccgcgatttaatgccaacaatgaaggaggcgaacgcccgcagcgttcgtacggtgaccgctcttatggcgaccgtccccaacgtccttcttacaatcgtgaaggtggagatcgtccgtatcgtcctcgcttcaataacaataatgaaggaggtgaacgcccgcaacgtccttacaaccgcgaaggtggttcttatgaccgtcctcaacgtccttcttacaaccgtgaaggtggttcttatgaccgtcctcaacgtccccgtttcaatagcggcgaaggtggtgagcgtccgtcttatggcgaccgtcctcaacgtccttcttacaaccgtgaaggtggcgaccgtccttaccgtccccgctttaataacggcgaaggtggcgaccgtcctcaacgtccttcttacaaccgtgaaggtggtgaccgtccgtatcgtccccgtttcaataacggcgaaggtggcggctatcgcagcaataacggcggtgggggaggttaccgtccgagatacaacaatgaccgttcacaaggaggctatcgtcctcgtccgcgtaccggcgattatgatccgaatgctaagtatagcgtaaagaaacagatcgagtacaaggaacagtttgttgatccgaatgaaccgattcgtctgaataagttcctggctaatgccggtgtttgttcacgtcgcgaggctgatgagtttatcacagcaggtgtggtttctgtaaacggtgaggtagtaacggaattgggtacaaagatcaagcgttcggatgtggttaagttccacgacgaaccggtaagcattgaacgcaaggtatatgtattgctgaataaaccgaaagataccgttactacatcggacgatccgcaggaacgccgtacagtaatggatttggtgaaaggcgcttgcaacgaacgtatttatccggtaggacgtctggaccgtaacacgactggtgtactgttactgacgaatgacggtgatctggcttccaagctgacacacccgaaattcctgaagaagaaaatttatcatgttcatctggacaagaacctgactaaagcagatatggagcagattgcagctggtatccagttggaagatggcgaaatccatgcagatgcgatcagctatacagatgatttcaagaaagaccaggtaggtatcgaaattcactccggtaagaaccgtatcgttcgccgtattttcgaatcactgggttataaagtagtaaaactcgaccgtgtattcttcgccgggctgaccaaaaaaggtctgcgtcgcggagactggcgttacctgtcggaagcagaagtaaactacctccgcatgggttcgtttgagtaataagtcaataaataacaacttgacagaggacggggaaagaaagcaggaaagaattcatcctgcatttgaaacctcgtcttcttgtatctaaaaagaaaaagttaaatggaaaagattggtagaacaaaaattgttgacctgttgaagcgcacagacattggcgctatggttaatgtgaaaggatgggttcgcacccgtagaggtagcaaacaagtaaactttatcgcactgaatgacggttctacaataaataatttgcagatcgtagtagatttggctaatttcgatgaagagatgctgaaactgattactaccggcgcttgtatcagcgtgaacggagaaatggtagaatcagtgggttccggacagaaagtggaagtacaggctcgtgaaatcgaagtgctgggtacttgcgataatacatatccattacagaagaaaggccactctatggaattcttgcgcgagattgctcacttgcgtccgcgtaccaatacattcggtgctgtgttccgcatccgtcacaacatggcgattgctattcacaagttcttccatgaaaagggcttcttctatttccatacgccgatcattacggcttccgattgtgaaggtgccggacagatgttccaagtgactaccatgaacctgtatgacttgaagaaagacgagagaggttctatctcttatgaagatgatttcttcggtaagcaggcaagtctgactgtttccggtcagctggaaggtgagctggcagctactgctttgggcgctatctacacattcggtcctacgttccgtgccgaaaactccaacactccccgccacttggcagagttctggatgattgagccggaagtggctttcaacgacattacagacaacatggacttggcagaagagttcatcaaatattgtgtgaaatgggcgttggataactgtgcggatgatgtgaagttcctgaacgatatgttcgacaaaggcttgattgaacgtctgcaaggtgtattgaaagatgatttcgtacgtttgccttatacagatggtatcaagattcttgaagaagctgttgcgaaaggacataagttcgaattcccggtttactggggcgtggacctggcttccgaacacgaacgtttcttagtggaagaacacttcaaacgtccggtgattctgactgactatccgaaggaaatcaaggccttctatatgaagcagaacgaagacggtaagactgtacgtgccatggacgttcttttcccgaaaattggtgaaattatcggtggttctgaacgtgaagccgactataacaagctgatgacccgtattgaagaaatgcacatcccgatgaaggatatgtggtggtatctggatacccgtaagttcggtacttgtcctcactccggtttcggattagggttcgaacgtctgttattgtttgtaacaggtatggcgaatatccgtgacgtgataccgttcccgcgtacaccaagaaatgctgatttctaatatttcggtatatttatgtaaaactcgcataatcttcaggttatgcgagtttttttatgctctgaattgctgtattctcaaaataaatctttatatttggaaatacgcattcgagagtgttaactaaaataatacaacaatgaaaaagctctatttctttaccatgctttcaataatgttgttagcggtaacaggtgcgacggcccagaagaaaaccaaattcaaagcggccgatttgaaaggtatttggcagctctgccattatgtatccgagtctcccgatgttccgggagcgttgaaacccagtaatacatttaaagtattgagtgatgacggacaaatcgttaactttaccattattcccggtgcggatgcaattattactggatatggtacttataaacaactcacggacgattcttataaggaaagcatcgagaagaacattcatctcccgatgctggacaatcaggacaatattttggaatttgagattaaagacaatgattatctccatctgaaatattttatcaagaatgatttgaatggaaatgagttgaacacctggtattatgaaacctggaagagggtggaaatgccggctaaatttccggaagatattgtgagatagaagagcgcgtacttttgggtggaggcacggattttgcaaaaggctgcatagttgtttggttatgcctgacaacagcttatttggtaaaatccgtgcctgtttttctataaaagataaaaacaaagcacttttggacaaaatcaaagtccgtagaaatagaaacaaaaatgaaaaaatagatttgcaaagggtttgtctgcgacttgctctaactttgttgccagtaatagaatacagtaacaaaataaagtggaacaatgaaaaacaaacttttactggcggtagggagtatggcgctcctgactgcttgcgatgcttcaaaaggaaatgagatggcatggtttgatcatgcagtgaaaacatcgggacatcagttgctctatatggcagaacaattgaagaatgaaccggataccgcctgttttccccgttctattaaagaaggaaagtacagactggagcaccccacagattggacgagtggtttctatcccggttccatgtggctggcatacgagttgaccggtgatgaggctctcgcaaaagaggcgcgtaaatatacggaccgtctgcaggatatgcaatattatacgggtaatcacgatttgggttttatgatgttttgcagttatgggcagggcatccgtttgaaaccggagccaacggacagtttgattctgattcattcttcagaaagcttgtgctcccgttttcgtccggaagtcggactgattcgttcgtgggatttcggcgattggagttatccggtgattattgataatatgatgaaccttgaaatgctgttctgggcttcggagcaaaccaataatccgaaatatcgtgaaatagccatctctcatgccgacaaaacgttgaagaatcactttcgggaggacatgacctcctaccatgtggtgagctatctggcagatagcggtgaggtagagtcgaaaggaacctttcagggatatgccgattcttctgcttgggcgcgtggacaggcttggggagtgtatggttataccatgtgttatcgcttcactaagcaacagagctatctggatgccgctcataaaatagcgcggttcattatcgatcaccgtccgtccgaaaatgactatgtaccttattgggattatgatgctcctaatattccgaatgaaccgcgggatgcttctgcggctgccgtaacagcttctgcattactggagttgagtggttatggcgacaagaaacaaggggaagaatatttccgttatgcggagcatatcctgaaacagttatcctctgatgattatttggcccaggaaggaggaaatcatggcttcatcctgttacattcggttggcagtttcccgcatgacagtgaaattgatactccgctcaattatgctgattattattatctggaagccttgaaacgttataaagatctgaaagaaaaatcagaaaatccgtcttactaacttgaagagaaaccgtaaaaaatttaaagttcagggcaaccgcatctaaaatatgaatttataactgtcggactttggcgcagttgtcctgttttgagccgatgccggtcctttatatgagttaaaaaacgggattcatttatcagattgaattgaaaatacttatctttacgataaattcttcaatattagctcatgaaagaccgacatttgctatttagatacctattcggattaaccgtttgcattttattttttcctttggctgtatcggccgccgacagcttcatccattttaagcgattatccgtagatgacgggctgtcgcaaaatactgtgctcgctctgacacaagatcataataataagatttgggtaggcaccatagacggactgaactggtatgaaggttcccgcttcgtttcgtattataaagcgccggatgaatgacggtttcctgttgggaacttcggaaggtgtctatttctattatgtacgcaacgaaaacgtgacccggcttcttctccagttgaaaggagaaaccatctccgatatgctctatgacgacaaaaccggcaactgttggctggcttcattgacaaacggggtgtattgtgtggataacaactttcaaataaaacatcattataacaagcaaaatactcctgcttatttccttacgaactcggtcaggacattgtccggagatgataaaggaagggtttggataggaaccatggaaggtttgcttatccttgaaccggagacgggaactttccgtatctgtcgtttttctcctgaagatccgactaccttgggccataattccatccgttctatcttgaaagataatcaagggggaatgtggatcggtacattttacggcgggcttaattattatcatcctctcgctccggcattcggacgcttgcaacattccgcctggaggaattcgttaagtgataacacagtgagttgtattgccgaagacccggataatggcaatctctggattggcacgaacgacggcggattaaattattataaccggaaaaccggagtcttttcatattaccggacgggtacttccgccaatgctttaaagtcggacaatataaaatgtatatggacggacaaggatggaagtgtctatatcggcactcatggagggggaatgagtcgtctgcatcaccggagtggcaggatagaaacatattcctttccccattctacttccctgactaacagttgttactccttattggacggaacggatggaacgctttgggtaggcggcatgagcgggctttaccttttcgacaaacagaccggcgaactgtcacagcatccattagctaaaaagcataaaaagttggagaatgtattgatatataccttgtttcgcgattcaaaaggaagaatctggattggtacggaagagagcctgtttttgtatgccggcgggaaactggaagaactgcatctttcttcttcggcttatctgcatgggttgatacaggctttctgtgtacaggaggatagccgtcatgaaatctggatcggttcttccacaggattatattgctataaggaaggagcaccgactgcctggaaacactatacgatgaaagacggtttgccaaatgactttatttataatatactggaagatgaacgggggcgtttatggttgacaactaacaagggactggcttgctttaatacggaggagggtactttcctcaactatacgaagcaggacggattgcctcacgatcagtttaactatttcggagcttgcaaagcgcacgatggtacattcttcctggggtctcttgggggcgttgcctatttcaagccatacgaattgggtgataatccatattccccggatgcggtagtgacaggagccgttgtcttaaatcaggtgattacggatatgaaaagtgaacgggtacgttattatcaggacgagcaagggcggatgctgggtatgtcgttcccttccgatcagaaactttttaatatccggtttgccgttatcaactatttggctggcaagcggaaccagttcgtttacaaattggaaggctttgaaaccgagtggaactactcccgccatgtttcctttgcacgggcaagttattccaatctcccgcccggtgagtatgtattcaaggtgaaggcatgtaacaacaatggaaagtggagtgaggcgaccactgaattttttgtgcatatcattccgatgtggtatcagacctggtgggcaaagacacttttcatcttcttttctgtagggcttctcgtctttgtgatctatttttttattgctcgtgccaaaatgaagatgcaagtccggatcgaacagatagaacgaaacaagatagaagaaatcagtcaggagaaagtacgtttttacatgaatatgtctcatgagttgcgtactccgttgagtctgatactggctccgttggaggaactcttggggcagagcaatctgaaaggaactccggtacagcagaaactggattacgtttataagaacggtcgtaagttgttgcacattgtcaaccagttgctggatttccgtaaagccgaagcaggtgtaatgcccattcatgttgcgcaggtgaatgtagaaggactgttgcaagatgcttttgccctgtttaaagaaaatgcgcagaagcgtgctatcagctttcatataaaatccgatctggaaggacggttgtttccggcggaccggacgtatgtagagactatcttgatgaacctgttgtctaacgcctttaagtttacaccggacggcggaagtattttgctttccttatggacagagggagatacctatggtttcacggtaagagatagcggaatcggtatgtctccggaacagctaacccgtattttcgaacgtttctatcaggtagacggtcagcgaaaggggacgggtatcgggctgtcattggtgaagatgcttgtggaaaagcatcacggcactattacggtagcaagcgaaccagctcaatataccgaatttaaagtcacgctacctgctgatatggctgccttcacggagaaagaacgtgaattgccgacacatgaagtcgaaacatctgcttctctccgggagcttccggtggctgatgaatatttctctggtgatgcgtcggctatagttgcagaagaactatcggacggtgatcagatagaagccggcagtgaggaagagcgtcctactatcttgttggtagatgacaataaagagatggtggattacctgaaagataatttccggcagaactatgtgacgctgaccgccggaaacggcgaagaagcattggctattatgaaagagcaccgtgtggacattgtcctttccgacgtgatgatgccgggtattgccggtatcaaactttgccagcttattaaacgaaatctgcaaacctgccatattcccgtcctgctgttgtctgccaaaggaagtgtcgatgcacagacggagggtattcaggctggagcggatgattacattgccaaaccgttctcgattcatttattgaaaggaaaaatagctaatcaactgaaagcacgccagcggttgaaacactattattcgaatacgattgatatagatactgctaaaatgacttcgaataatctggatgaggaattcatgagcaaagctattcaggtagtagaagaaaatatcagtaatgaagacttcacctctgatgagttggcaagtcagctttgtatgagccgttcgtcactgtatctcaagatgaattccatatccggtgaaccgcctgccaactttatccggcgcatccgttttaataaggcgtgtaaattgttgcttgaagggcgctactccatttcggagattagcggaatggtaggcttcggatcttcttcttacttctctaccagtttcaagaagtatgtcggttgtctgccatcggagtatgtgaagcagcatacaaagtaattgttttgcggttatgcatttgttcaccacagaggacgcggaggacacagaggtgaagtgcagaaatgaatgagagttttttgtctactataaagttgaaaaacataaaaacatctgccacctgcaaccaaacgcgtgtaatgcactaattgacaaatagttggaacgtggcagatactgtggcagataggttgcagataaagtatctgcaacgcgttatataatcaaagaaaaagccttgattcctttatgcaaagctatgggataattggggtgactctatggataatttgtggtgtctctacggggaaacgacagtatccttacgtagaaactgtagtgtcccgccttagaaactctcgtttcctaccgtggaaactgtaatttctaatgccggaaacgacagttccccgcctggaaacgggaagttaatgcatacaataaacttttgccctcctggagaattggcttatgcaaggcttatactgtgttgcagatactttgatctgcaacctatctgcaacagtatctgcaacgatacaactgtttgtcaactagtgtattacacgcgtttggttgcaggtgacagatgtttttatgttttttcaactttatagaggaaggattacgcatcaaaattagggtcaccaccgtaagtcataaaccaaattcacctctgtgtcctccgcgtcctctgtggtgaaaacctaaacaagaactaataactttcatctttctatcaattccagtcattccgttttgggggctatattacccttttaccctctttgtagcctcctgtaacgcttgttttggacgaattttaagttgaaatgaacgaaaacaaagtcctgttagacagtatcagagaaggaagaaatgaattgaaagttccgtttcggacggtttatctacatttgcctacagaaaaaccaatcatttgatatcatgaaaaaagtattattgatttcattcgtaatcttgtctgtggctgcacagatgacacatgcgcaaaaacaagcagttattaagctgacggagaagacattgatgcatgaaatgcgtgccactccttatcctcttgataaagcggtggtaaatgaccgtgcggtttctttccaatggccgctccgttcggacatgaactcgcaggacagtccgttggatgggttcgaacacaaagtaaagaaggtagataaaacgaagattacctatcggttacgttattcgcaggatgccggattgaagtccggagttgttcaggtggaaactcgttggccgttctataatccggaacaaccgcttgcgccgggggtatggtactggcagttcggttatgtagaaaacggacaagtgacctggggaagcacacagcaagtcaccgtagaaaatcgtccgggtaaattctgtccgccttcattgaaaacagtgttggcaaaactacctgccgaccatccgcgtgtgtggatcatgaagaacgaatggaaggactttataaatcacagcaaacaaaaggcagaaagacaatggtatcttgagcgtgcagatcaggtacttcagactccaatgaaatcagtgaaagatattaatgtctcgcaggtgaagaatctgaagaacgagatgcagataaattcatacctcactcgtgaaagccgtcgcatcatcgatgcggaagaaggcaacaccgaagcattgatacgggcctggttgctgacacaggatactaaatatgctgacgaagccatcaaacgggtatttatcatggccgactgggataaagataagaatgtaaaaggagattttaatgcttctagcttattgtctctctgctctatggcttatgattctttctacgaccggttgaatacatcacaaaagaaagcattgctggaagccatcaaaaataaaggtggtgaaatgtatgagaactttaataaccggatggaaaatcacatcgccgacaatcatgtgtggcagatgacacttcgcatccttacaatggcggcattcagtgtatatggcgatctgcccgaagccaacacatgggtggattactgttataacgtctggttggcacgtttccccggattgaacaaagacggtggctggcacaatggcgattcttactttacggtcaatacccgtacattagtggaagtaccttactattatagcaaactgaccggttacgacttcttttccgatccttggtatcagggaaatatcatgtataccatcttccagcaacctcctttttccaaatccggaggaaacggaagttcacatcagaatgtggcacgtcccaacagcatccgtataggctatttggatgcgctggcacgccttaccggaaacacgtatgccgctgatttcgtacgccgcacattgaaagtggaaccggattatatgaagaaagccttattgagtaagcccggtgatctggcctggttccgcctgcaatgtgataaacctctgccggaaggtgaaggattgacagcactccctgcaggatacgtcttccccgcaacaggacttgtctctttccagacgaactgggatagagtaggtggaaatgcgatgtggagtttccggtcaagcccttatggttctacctctcatgcacttgccaatcagaatgctttcaataccttctatggtggaaaaccattattttacagtagcggacaccacattgagtttaccgacgtacatagtatgttgtgccatcgtgccacacgtgctcacaatacgattttggtgaacggtatgggacaacgtatcggtacggaaggatatggatggattccccgttattatgccagcgagaagattggttatgtgctgggtgatgcttccaatgcttacggaaaagtgatttcaccgctttggctgacacgcggcgaacagtcggaggtgcattatacgcccgaaaatggctgggatgagaaccatgtgaaaacgttccgccgtcacattgtcaatttgggaaagactggactcatctttatctatgacgaactcgtggcagacgaacctgtaaactggagttatttgctgcataccacagaaaatcccatgacagtggatcaatcgaatcatcgcttcgtgcatattcaagccacgaaccgcggaggagcatcagacgcttatcttttctccactggaacattgcagacagatacgacgagccgttttttctatccggcagtcaactggctacgtgctgatgacaaaggggtgttcaagaagtatcctaatcactggcatttcaccgctacatcggaaaaggcacaagtatatcgttttgccactgtcatcaatacacatgcactgaaatatcctgccaaagatcccgaaatcttatccgacggacgtatcaaagtgggcggatggctgatcagtgttaacctgaaatccgacggtgctccttcattctttatccgcagcactcaagagaaggtgaatatcacttataaaggtgaagctactgtcatcaatgaggatgggtacgaaacggtaatgagggatacagtgcccgaactggaaatctgatcaatgaacatgaaagatacgaatatatgagacactctacttttaatatgagaactatatgtctgttggctgcattatcgggcataaccgtcttgtcggcacagactcccggtaaaccccgtgtacagacttcggcagctccggaggaaactacggtctacaagcccggcgggaaaaagcaggaaacagcagttgcgacttcttcaaaaaaggaggaggataaacgccaatccggcaaagagaatgcaggaaagaaagcggctgcctttgatggtcaacgctatctggcactgaaaacgaatgtaatatatgatgcttgtgctttgctgaaccttgccgtggaaatgcaggtgcataaaaagatcacggtagagttgccgttgacttgcagtttgtgggacttgggggataagcacggcgtgcgtacggtagcattgcaacctgaagcccgctggtggataggaaatgaaacaggacggggacactttgtcggactgcacgcccacgtggcatggtttaacgtgaagtggaacgatgaccgttatcaagatacggatcgtccgctgttgggagccggaataagctatggttacaaactccctctttccagacactggggagcggaatttaatctgggagtgggatatgccaacatgaagtataacacctattataatgtagacaacggcgcacagctggatacgcgtgtccgtcattactgggggataacccgtgtgggagcatcgttggtctaccgcttctaaccttagatagggacatacatataaataagataacaatatgagaagaaatttatatatactggcacagtgcactttcttgttgttcatcaccctgctggtgaatggatgcagcctgcacgaagaaccggaaatgactcccgaaggagaactgggagtggacccgacagctgtaacactcaaccttaatctggcaatgaatctaagtttggcagaaagagcaccggtgaccatcacccgtgcgtcggaaaccaactatctgcgtcgtttcatcgtagaagcctatctggatagacaggtggcggcacggcaaacggtatatgaagaggattttaaccgtgccagtctgtctgttagtatgaagctgcacgcccgtaattaccgcatcctggtgtgggccgattatgtgaatgcggagacaccggaacagggacttatctacgatgccaagaatctggcttttatccttcctgccggaaagtatatagggaatagccgatataaagatgtttttgctgcttctgctgtggcagacctgacttctttccgcaatcattggggagctgaaacaagtcttgacgttgaactgtatcgccccgtagcacgctatgaactggtggctaaagatgtagcgacgtttctcaataaactgtccacaggcggactgaaaggtgaaagttttaccgctcgtgtgaagtacagtgattatttgcctaccggctacaatttgtgggatgatgtacccaagaactcgctcatgtacatggaatataaagtggcctttgaacgccctgccgatggtacgaaagaactgatactgggattcgactatgtgttgaccgatgccggagaaaccgtttccattcctgtagagctcgaaatcttgaatgagaagaatgaagtgctggcacgtactgctgctttccgtattccttgtgaacggggcaaaaacacaacggtacgcggaaacttcctgacttccgatgccaatggaggaatagggatcgatcccgattatgacggtgatctggaggtagaccttggagaattataaaatagacaaatcaattaagaattgcttaaccataaaacaattaagatcatgaaaaagaacttattttattcgctaatggctttgttcgtagtgctttttgcatcctgtggacaagaagaaatcgtttcggacaacggaacagaaatcaatgctcctgttactatctctgtacaggctcctgtaaataacgtctttagccgtgcggttaccattcctgacggttatacgatgcaatgtatcatgcaattactgaatgctgatggcaataagataggcgatcaggtaactaaaccggttacagacggtaaggtatctttcactatttctgtagatgaacaaaaagaagtgtcgaaagcattgttttgggctgaatacgtaccggaaagcggtgccgctaataaagtatataacactgctgatttgagagtagtaggatataatactgcgtcattcgatctgacaaatgatgcgttgatggcagccagcgacgctttctgcggaaaattggaaacgattggtaatgccagtgtgacattgaaacgcccgtttgctaatgtgagcgtaaaaccgaagaatccggaagtagctgcggcagctaataaactggaaataaaatataacgctttgagcggatatgatattttagagggtaaatgttctgctacgactcctgtgacttatacaaatgcaggttttgcttctgcggatggcaattggttcgctaatttcttttttgctccttcaaatgtaagtaaatttacagaagaaataaccatggcattgagtggcggatatagtaaagagattaaaataccggcaaatacattacctttggacgctaatatgcagattatggctaaatttgaaatcggagatggaaactttgacattgaagtaggagtggatccggattatgaagcgttggaaatgaaggttggtagttatatcaatgcagaaggtaaagtggtacgtgatgcagcggatgctgtcggtattgttttcaagatggaggctattggtagtgatgtgccggctaattatcctgtagcacttcaaggtaagacaattgccggatatgcggtagcgattgagaatgtagcgactggtcgtcaggttcttaataatgccgcaatgagctctttagttacaacagatgcaactgtaactaatggaacacaggctacagatgctttacttacaggtattggagaagttgcatttatgacaacttataatagctgggtgaatgaacatccgcttgatggtgaaagtttgagttcatggtatattcctacagtggatcaattaggtgaattcatgggaatgttatttaaaataggagaggtagagcccactggtggacaagctttcagagaaatgccggaatttgcatttgaaaatggtgtaatgtttgaccgggatcctattgagtccgtatattatgcctcttgtacggttaatggaagtaaagatatttccggtgtaatcattaatgtggataaaacaactaagcaggtgctggatgcaaaagcaagtagtctgaaagttactggtagttcgcagaaagctctttgccgcccaatgattacaatctttaaatagtcactgaataatcgaccttactcaatagaagttcaaggaaagtgggatcccccgtcccgctttaccttcttcttacattgaaacttttgaaaatagccctctaatcttatacctagaaaagaaaataatatgcacaccacatttcgcctatcggtttttcttttgttcatggtacagttgttctgtagctgtacatctgactcgctgcccgaaccggacagtacgcagccagagatgcctgccggaattcccgatgcctatcaggataagatacggacgcaaccttatcccaaagcagataatgaattgtatctgaatcctgctcctcttattgttcctcaagccatgaagacgggcgaaagactgcaattttccctttcacgtactgaagatttcagcagttccgaaacgctactttccgaaccgcaggaatggtgtatgtataatcttcatcgtcgtttggaggtcggcacatggtattggcgctttcgttccaccaatcttaatggaactacgcccggtgaatggagtgctatctatcgtttcgaattaaagaatgatacaccggaatttgtaacacctccttttcagacattcttagcaaatgctccccgtctgcatcctcgtatttactgttttttagacgaccgtatcggagaggctcgtaaccgtgtcacttcacaccctgaatatgcagaactacaaagtcgtgcttcacaggcattgaaagccgaatacaccggaatgactgatttatatagccgtgcagaagagctccggcaacatgccacttatctttatcaggcctatcatttaacccaaaaagaaatttatgccgaaaagttacgtcagcttctcgaagcgttgattgtcgctccccctgctgatggacaactttttgcatccaactttactgccagcaacatcgcatggtgtcttgttgcagcctacgatctgctttataataacttgtctgcttccgatcgtactgctgccgaagaactgatgatgcgtgtggcacgttactattacaaggtaaattgcggttttcaggaaaaccatctctttgataatcatttttggcagcagaatatgcgcatcctctttcaagtggctttgtcgctttacgacaaaccggcctattcttccgaagtgctgcccatgatggagtattattatgaattgtggacagcccgtgctcctgcctccggcttcaatcgcgacggtatatggcacaatggtactggctatttcagtgccaatatcttgactttggcgtatatgccgtctcttctttcatttatcagtcggtacgattatctatcgcatccgtggtatcagaatgtcggacgctcgctggtttatacttgtccgccaggatcgaaaagcaatggctttggtgacaatagtgaaaagggtagcgaacccaaccgtttggttgctgcctttgctgattatctggcgtgtgaaacgggtgattcctatgccggatggtatgccggagaatgttgggagctgttgcgccgggattatgaattgcgtctttaccggatgtgcaccgagcaggattacaatacaacttttcctgccagggctgataaaatggtatggtataaagacgctggtgaagtagccatgcacagtgctccggaagatacgggaaaggatcttgcactctcgttccgttccagtacattcgggtccggcagtcacactactgccagtcagaatgcttttaacctgttgtataaaggtgtcgatgtgtatcgcagtacgggttattatcagaatttcagcgatgctcataatctgatgtcctatcgccatacgagggcgcataattcactgttggtaaacggcatcgggcaaccttattctaccgaaggttatggcagtgtgacgcgtgctatgggcggacagcatatcagttactgtttgggagatgtttcacatgcttacagaggtatcagcaatgacccgatgtgggttggctacttcaagcaggcaggtattgagcagacgcctgaaaatggattcggtgccactccgttgactaaataccgccgacatgtgttgatgcttcatcctcatacggtgattgtgtatgatgaactggaagcatcggaggctgtccgctgggagtggctgttgcatagtcctacggaatttaagatggatgcgacaaagaaaacgttgtctacaaataataaaatcaaaggatggatggctgtgacacaactttttggaggacatgtttttacgctgtcccaaacggaccgtttcgtagtgccgcccgccatcaccggagcggagtatcctaaccagtggcacttgactgcacgggttgacggttgttctgccacccgtttcctggctattatccaggtaggagatgaggctgtccctattatcaaccgtgacggtgatacctttaacgtaggcgactggacgatcaaagcggttttggatgcttccaaagcacccgaacttgcagtgagtcatcgcaccgaacaggcggtatttagttatggaacagacaatcctgcgttgaatggcaatttttactctcgacaatatacgggttcctcgttgctttacgatgagatagacggggcttatcgggtggttgaaatgaccgaccggagtcctatatctacccgggtagtaaatcaatgataaacaatgaaacatagtgaatataaataacaaacagaatatgatgaaaagtagaattatttgcattttgttgcttcttgtcggtgcatccggcatttatgcccagagtttgaccgttaccggtaaggtggtggacaacgaaggcttggaagtgattggaggaaatgtaaccgtgaaaggaaaacaaaacacgggtaccattaccgatatcaatggtaaatacaccattaccgttagtgatccgcagaaagatgtcttggttttctcttttatcggattggaaaatatggaagtacccgtgaaaggaagaaaacagattgatgtgaccatgaaggctgcgtcggtattgttggatgaggtggtagctatcggttatgcaacagtaaagcgtaaagacctgaccggttccgtggcttctgtgagaagcgacgatttgctcaaagttccttcgtctgatgtaacccaggctttagcgggacgtatggcgggtgtgcagattatacaaacagacggtcagcccggtgctacgatgtcagtgcgtgttcgtggcggtatatcaattacgcaaagcaacgaaccgctttatattatcgacggatttctgacggaagatggcatggccagccttgatcctgccgatattgaaagtatcgacgtgttgaaagatgcttcggcaacagccatctacggcgcccggggagcgaatggcgtagtggtaatcaccaccaaaagcggtgcgaaaagtgaagggaaagcgactcttactttcgattcttatgtaggtgtgcgtacgcttgccaagcggttggatgtattaagtgtagaggaatttgtgttggcggattatgaaagaacattaggagatgctactgatcccgaggaaagtatgcggtcatggcaaaaccgttatggtggttttgtcgatcttcatgaaaactatggtaatcgtaaaggtatcgactggctggaccgtacgatgggacgcactaccgttacgcaaaattaccgggtaggtgtcaacggtggcaatgataagttgaactacaatatgtcttatggttacttcaaggatgaaggtgcgatggtatatagcggcagcgacaaacataacattgcgcttagcgtgaaaagcgaagtgaataagcggctttccgttacaggacgtatcaacttcgattatctgaaagtgtatggagcaggtgttgccggaaacggtacgaatgaaggcggaagtaatgtagatgcaaagtttaataaaatggttcagattttgcaataccgtcctaccattggtatacgtggtaatgactcggatttgttggcaggagaagaccctgtattaagcgatgcagacggaaacgtgatgcagaatccgttgattgccgccgctgaagaaaaagataataaggaaacacgtactttgcaagccaatggcggactgactttcaaaatcatcaaaggattgactttccgcaacaatacgggtatgcgttatcagctttaccgccgggagcttttctatggcgaccaatctattatgggaagacgcagcggtatttacggctctatcaggaatacggagaccggaagttttcagacctctaacgtcttgacttatgataaacgttttcagaagaagcataaagtggtagtacaattgggacaggaatttgtaaaacgctggactcgtgtgctcgaatccggtgtcagtgggttgcctaccgatgagttcattttgggagatatgagtctgggtactccatccgttgcttcgtccgatgaaaactatgatgataatctgctctcttttttcgctcgtctcaactatgactttaccgataagtatttgttttccgcaacgttccgtgcggatggctcttctaaattcggaaagaataataaatggggatattttcctgccgtatcggcagcctggcgtgtgagtgaagaggattttataaagaaactgaatgttttctccgacttgaaattccgtatcggatacggtttggcgggtaacaacagaatcggtagctataacagccttgctttgatgtcttccatcatcacagctatgggagatcagcttactcccggttatgcttccaagcagataccgaatcccgatctgaagtgggaagcgaacaagacttttaatatgggagttgatttaggttttctgaatcaacgcatcactgtttcgcccgaattctatataaataggagtagtaatttgctgcttaacgcccagctgccttattcttccggttatcagagtatgttgattaatgccggagaaacgaagaatgtaggtgtggaactgactgtgaatactgtgaatttctctacaaagaagtttagttggaacactacactgacgctgtcgcacaataaaaattccgtgaaagcattgaccggtgaggcggtacaactctatgaagccaggttcggctttaaccaaaacactcatcgtattgctgtcggagaaccattaggacagttctatggttacatcaccgaggggctgtatcaggtagatgatttcaattatgatgcttctacgcagacttatacattaaaagatggagtaccttatcatggtgataaagggcagattcgtccgggtatgtggaagtttaagaacttgaccggagatgataatgtgattgatgaaaatgataaaacggtcattggtaacgctcaaccgaaattctacggaggattgaacaactcttttacttacaaaggatttgatttaagtatattcctgactttcagctatgacaatgaagtactgaatgcgaccaaactggttaccagtaaggtgggtagcctgaactacaacgcattggacgtgatgaatagctctaatcgctggatgactatcaattcggatggacagaaagtgacagatcccggagaactggctgctttgaatgcaggtaaaaccgtagccgcttatcatgatgctcaacaaggagacaattatattcattcatgggcagtggaggatgcttcctatttgaaactaagtaatgtgactttgggatatacattccctaaaaatctgattgcaaggataggattgaagaacttgcgtttgtatgccaccggtaataatctcttgacttggaccaagtattcaggtttcgatccggaagtctctacgatgaaaagcggtttgacaccgggtgttgactttggggcatatccgcttagccgttcttttatttttggtctcaacgtagcattttaattctttaaatacatagtaatcatgaaaaagatacatctattatatgccgtattcgccctattggcaacaggattttcctcttgtgaggatttgctgacggaagaacctaactcaaaatatgaccgggaccgctatttcgattcggaagataaagcggaaatggcagtgatgggaatatatagttcattgtcggactttaatcattatggttggtacgaaatggcctctcccgcatcggacgatacctattatacggctcgtacgcagtctgacaatcaggttcacgatattgcacattatcagctaaactccacgaatacgtggattgaaagtatctggaaactgaaatatgagggaatcgaccgggctaacctcaccattgacggaatctgtggcatgacaggatacgcagaaaatacccgtctgaaagcattggaagcggaagctcgctttctgcgtgctttcctcgcatttgatttggtgagatattggggagatgtgcctttcaaaacatcttattcatcatcctacgaatctgcttttggtgaacgtgtggacagggaagtgatttatgacgagattatatccgaccttactttcgctaaaaacaatctggattgggcaactgcttcttccagtcccgaacgggtgacgcaaggggctgcccgtgcattgctgatgcgtgtatatttgcaacgtgcaggatatagccttcaatcgaatggacagttgaaacgtccggaggacagtaagcggatggaatatttcgatgcagtgataaaagagtgggaggcttttgaaaagaaaggataccatgatttttatgatggtggttatgaggcactctttaaaagctactcgcagggggtactgaataataaggagagtctttgggagattgctttctatcattcacaaggacgtcgtaacggtggagcatggggaatttataatggtccgcaggtggcggaacctaccggaatttctgcatctgaagcaaatcagtatatgggacgtgccaacggtttctttatagtcgttcccgaatggcgtaacttcttcgaagcgagcgataaacgccgtgatgtggcgatttgcacctatcgttatacctggaatggtactaaaaaagagcatgtaaaagaagaaagaagtgcaggtagctggtatgtaggaaaatggcgccgggaatggatgccgaaagagtcatggaacaagaatatcaattatgcggatgtgaactattgccctttgcgttatgctgatgtggtattgatggctgccgaagcgtataatgaaacaggaacagacagacaaaaagcatgggatttgctgaatagcgtacgtacacgtgctgaagcaacttctattacagaagcgaattatgatgaaatgatgagcgtacggaaaaagacacataacctcactttcatcgatgattctacaccggaaggaaagttccgtacagctctttactgggaacgtggctttgaactggcttttgaaggacaacgcaaatatgatctgatacgttggggagtactgggaaaggctctgaaactgtttggtgagatcagttccgtcaatcagaaagagaacaaaccatatccggcttaccggaattttatggagggtaaacatgaacttttccctatccctctgaaagagatacaaagtaatccgaaactcaatggaatgaataataacgggtattgagaagactctcaatagaataggcgactggaaaaatatacaaaaatagtttgccaattcaaagaaaagccgtacttttgcaagccgattattatcacaaaatgataagagattaattcatagcaagttagtattcctttgtccggggaagactaatgagtggtgaagaaatttttagtagtaacatttaaaaaacaaaattagagtggatactttaagttacaagaccatttctgcaaacaaagcgactgtaaccaaagaatgggttatcgttgacgctacagaccaaacattaggccgtctgggagcaaaagttgcaaaattgctgagaggaaagtacaaaccaaactttactcctcacgtagactgcggtgataacgttatcatcattaatgcagacaaagtaaaactgactggtaacaaatggaatgacagagtttatttgtcatatacaggttatcctggtggtcagagagaaatgactcctgcccgtttgatcacaaaaccgaacggtgaagagagattactgaaaaaagtagtgaagggcatgcttcctaagaatatcctgggagctaaattgctgaataacttgtatgtttacgctggtagcgaacacaaacaggctgctcagaacccgaaaatgattgatattaattcatataaataagatataatggaagtagtaaatgcattaggcagacgtaaacgtgctattgcacgcatattcgtaagcgaaggtacaggaaagattactattaacaagagagaccttgcagagtactttccatcaactattcttcagtatgttgtaaaacaaccattgaacaagctgggtgctgctgagaagtatgacatcaaggtgaacttgtgtggtggtggtttcactggtcagtctcaggcattgcgtttggcaatcgctcgtgcactggttaagatgaacgctgaagataaagccgctcttcgtgcagaaggcttcatgactcgtgaccctcgttctgttgaacgtaagaaaccgggacagccgaaagctcgtagaagattccagttcagcaagcgttaatgtgctgcctgatagaggaatatgtttagtatctaaactactgggactctgctcatagactacccagcggttggtttagaaaaaacaaaaaagaaagtaaacgatttaaagaaaaaacaagatgtcaagaacaaattttgatacattattggaggctggttgccacttcggacaccttaagagaaagtggaaccctgcaatggctccttatattttcatggaacgcaatggtattcatatcattgacctccacaaaacagttgcaaaagtagacgaagctgctgaagctttgaaacagattgccaaatctggcaagaaagttctttttgttgctactaaaaaacaagctaaacaagttgtagctgagaaagctcaatctgttaatatgccttatgtaatcgaacgctggccgggtggtatgttgactaacttcccgactatccgtaaggctgtgaagaaaatggctactatcgataaattgactaacgatggtacttactctaacctttctaagagagaagttcttcagatttctcgtcaacgtgcaaaattggacaagactttgggatctatcgcagacctgactcgtctgccgtctgcattgttcgttatcgacgtaatgaaagaaaacatcgcagttcgcgaagctaaccgtctgggtatccctgtatttggtatcgttgatactaactctgatccttcaaacgttgatttcgtaattcctgctaacgatgacgctactaaatcagtagaagttatcttggatgcttgctgcgctgcaatgatcgaaggtttggaagaaagaaaagctgaaaagatcgatatggaagctgctggtgaagctcctgctaacaaaggcaagaagaaatcagtgaaagctagactcgacaagtctgacgaagaagctatcaacgcagctaaagctgctgctttcatcaaggaagacgaagaggcttaatatataaaatgtgccaatttgctaatgtgcaagagtatatttatacgcttgtatcttgattggcagattggcacatttttttgtttcgaaaattattattcatttaaataaaggaaattattatggctgtaagtatggctgatattaccaagctgcgcaaaatgaccggagctggtatgatggattgcaaaaacgcgttgactgaagctgaaggcgatttcgacaaggcaatggaaattatccgtaagaaaggacaagctgttgctgctaagcgttcagaacgtgaagcttctgaaggttgcgttttggctaaaactaccggtgaccgtgctgttatcgttgctttgaagtgtgaaactgactttgtggctcagaatgctgatttcgtgaaactgactcaggatattcttgatcttgctgtggctaataaatgcgctactttggacgaagtaaaagcattgccgatgggtaacggtactgtacaggatgcagtgactgaccgtagcggtatcacaggtgagaaaatggaactggatggttacatgactgtagaaggtgtatgcactgctgtttataatcacatgaacagaaatggtctttgcacgattgttgctttcaacaaggaagtgaacgagcagttggctaagcaaatagctatgcagattgctgccatgaacccgattgctattgatgaagatggcgtttctgaagaagtaaaacagaaagaaattgaagttgctattgagaagacaaaagcagaacaggtacagaaagctgtagaggctgctctgaagaaagctaacatcaacccggctcatgtggacagcgaagaacacatggatagcaacatggctaaaggatggattacagctgaagatgtagctaaagcaaaagaaattattgctactgtttctgcagagaaggctgcacacttgcctgaacaaatgattcagaacattgcgaaaggtcgtctgggcaagttcttgaaagaagtttgcttattgaaccaggaagatatcatggacggtaagaaaactgtaagagaagtgttggctgctgctgaccctgaactgaagattgttgatttcaagcgtttcactttgaaagctgaataatcaatcagattcaaattctatgatgtgtccttaaaaacggaacacgttaacttaatagaggtattcattaagactctctatttgaagatacaagaaaggcaactaattcataacgagctagttgccttttcttttgatttgatcttatcattcttttcctcaagaaactgctatgtataacatgaggcacattcttggggagggttatttcaatgctttgtctatttccttcatcagcttgtccatttcttcttttttataaccgacagtggcggatatcactttcccttctttgtcgattaagtaacttctgggaatgtattgactggcaaacttacctgtgacttcccgtttcgggtccgggtagagaggaaatgtaaaccctttgcgcttgttgtattccgttaattgatcgtcggtatgttcgcgtccgattactaacatgcagaaatctttgttgtccttatatttaggccagagtgttttttgaacttcagccagttcgctttggcaaggaccacaccaagtagcgaaaatattgattaatacaactttccctttcaggtcctcggagcttacagtaccgttcactgttgaatgaagggtgaaagcaggcatactatcgcctaccttgacgatatcagcattgttgtcttgtgcaaatgacaacagtgagaataacgctgctgcaaagaataatgttacttttctcatatctttaaaatttctagttacaaaatgctatttagtttaacctcctataccttttgttttagagtatccttctttaatgagcagctctatgattttggttttgaaatctccttgtaccataatctctccgtctttagccgatccgcctactccgcatttgcttttcagtagcttacccagctctttcaagtcgttttccgtacctataaatccggtaattaatgtgaccactttaccgccccggttctttttgtcaatggaaactcgcaggttttgtttgtttttgtcgagagtaacttgctcttcatcgttatccatttcatagccgaagtccggattcgtggaatacactacgtttaatctatctttccaatcattatttttcatactcgtcatttttaatccttttcaaaagtattaaacttatggaaaagagcaaaatttgaacctcttttcattgttttgtttaatctctattaaggttttctgttatagggttgtcagtctcaaaaaagattgtacttttgcaaaataccaaatttagtaagaagaatgagcacatctatacgaaaagaggcggataaagtgccggagcctaccttgcgcagacttccctggtatctgtccaatataaaactaatgaaagaaaaaggagagcagtacgtctcttctacacaaatctctaaggaaataaatattgacgcttctcaaatcgccaaggatttatcctacgtcaatatctccgggcgcacgagagtagggtataacattgatgcgctgattgaagtgttggagagttttcttggatttaccaatatgcacaaagccttcttgtttggtgtaggtagcctgggggctgctttgcttcgggattcaggtttgcatcatttcgggctggagattgtggcagcttttgatgtgaatccggaattggtgggaaaagacctgaatggtattcctatttttcactctgatgattttgaggcaaagatgaaagaatacgatgtaaatatcggtgtgttgaccgtgcctattaatattgctcaggaaattacagataagatggtagacggaggtataaaagccgtatggaactttactcctttccgaatccgtgtacccgagaatattgtggtgcagaatacgtctttatatgctcatttggctgttatgtttaaccgattgaattttaacgagaaataatgaagattattgcagtaggcatgaactacgcccagcataacaaagaactgggacatacacaagtaaatacggagccggtgatttttatgaagcctgattctgctattctgaaagatggcaaaccgtttttcatccccgacttttccaacgagatacattatgaaacggaattagtagtccgtatcaaccgattggggaaaaatatcgctccccgttttgctaaccgctattatgatgctgtgacagtcggtatcgactttacagcccgtgaccttcaacgaaagttccgtgaacagcggaatccctgggagctttgtaaaggttttgactcatcggctgctattgggacttttgttccggtagagcattataaagatattcaaaatttgaacttcaatctgttgatcgacggtaaagaagtacagcgtggctgtacagcagatatgcttttcaagatagatgatattatcgcttatgtcagtcagtttgtaacgttgaaaatcggtgatctactctttacggggactcctgtcggtgtaggtcctgttagtatcggacagcgtttgcaaggttatctggaagaggaaaaactgctggatttctatatccgttgatcttttttattcattagtactcatttgttatacaaaatatgaagataagagtaggctttggcttcgacgtacatcagctggtcgaagggcgtgaattgtggctgggcggtattcttttggaacataccaaaggattgttgggacattcggatgctgatgtattgttgcatgcggtttgcgatgctttgttaggggcagcgaatatgcgtgatatcggctatcactttcccgatacggctggagaatttaaaaacatagatagcaaaatactgctgaagaaaacagtggaattgattgctaccaaaggatataaagtgggtaatatcgatgcaaccatttgtgccgaacgcccgaagttaaaggcacatattcctttgatgcaagagacgatggcaactgtcatgggaattgatgcggatgatatttccattaaggcgactactaccgagaaactcggttttacgggtcgtgaagaaggtatatcagcctatgctaccgtattgatagagaagatttcttaacccctaaaacaaataaatatgattcggctcttaaaaatttacttaacacttgtctttttgttggtaacaacttttggtatggctcaaaagagtgaactgaaatttagtaaagatggtaaattcaaaattgtgcaatttaccgatgtgcattttaaatacggcaaccgggcttctgatatcgctttggaacgcataaatcaggtgcttgatgatgaacgcccggatttggtgatttttaccggcgatgttgtttattctgctccggcagattccggaatgttgcaggtattggaaccggtagttaaacgcaaactgcctttcgtggtcacttttggtaatcatgacaatgaacagggaatgacacgggaacagttatatgatattatccgtaaagttcccggaaatttattgcctgaccggggaacagtcttatcgccggactatgtattaaccgtgaaatcgtcttctaatgttaagaagaatgcagctttgctttattgcatggattctcattcctattctcctttgaaagatgtgaagggatatgcatggcttacattcgatcagataaattggtatcgccagcagagtgcagcttataaagcgcaaaatggtggactgcctttgccggctcttgcctttttccatattcctcttcctgaatacaatgaagctgcccgttcagaaaatgcgattcttcgcggaactcgtatggaggaagcttgtgcacctaaattgaatacgggaatgtttgcggcaatgaaagaagcgggtgatgtgatgggtatgtttgtaggacacgatcatgataatgattatgcagtgatgtggaaaggtattcttctggcttatggacgcttcaccggtggaaatacggaatataatcatttgcctaacggggcccgtatcatcgtattagatgagggggctcgtacatttacgtcctggattcgtcagaaagacggagtggtggataaaatttcttatccggcaagttttgtcaaggacgattggactaaacgttgaggcttgcgaacttcacatggctaaggcgcgtgtactttgaaccatagctttcgtattggcgtgatactttcgccgatgcaatgtagataatatctcccagtcggtattcatgttctatccctgatagagtgcatgaaaccgcactgggattttttgatggaatacttataataaccaggtttccactggcatcggttaaagttagtatctgcttgacaaaaaactgtggggtagtgccgttcactcttgttttgtatggatcgtcttccagtcgtacgcgtgtgacttttaattttaagtcagtcagtttttcccctaattctcccaaatagcggcttgatgaacgtttctctctcgactttctgatcatgatatccaaatgtatggaatgataagcctgtgctatttggacgaagcgttcctgtttaggtatttttggggtgaacttgtaagctacccaacttaaataggcaggatctatcttcaaaatttcatgaagaaaatgtccccggtattttccgaaaaagataaggtcgtcaccgttactctgcattcttttctcattgtaatccatgagaataaggcaacgccttgaatagtaaaacatcgtactggctattcggagggattcgttaatgtccggtgacaggtcatgtatataaagaatagattgcttttcgggcaggggagagtacagccaaagggaatagtttggtttccccggtcggggcaacaccaccaagtagactcctgcctctttaaaagaggctctgcctcggttgtactcattcaatttggcatacaataaggcttcttcgttttcggaaatgcccggtaatctagggttagccataattgttctcgcttttggtatatttcaaatataaggattttctttcagaaaagcaacttttctctttgaaatctcgtacatttgtaaccatgtaaattttcaaaattcgaatggaagaacgaaacaagagagtattggtaggtatgagcggtggcatagacagcaccgctacttgcttgatgctgcaagaacaaggatatgagattgtaggagttaccatgcgtgtgtggggagatgaaccgcaggacgccagggagttagctgaacgaatggggattgaacattatgtggcagatgagcgtattccttttaaagagaccatcgtaaaaaacttcatagatgaatataagcaggggcgtacaccgaatccgtgtgtgatgtgcaatccgttgtttaagttccgtgttctgacggagtgggcggataagttgaattgtgcatgggtagctaccggacattattcgcgattggaagagaaaaacggaaacatttatatagtagccggagacgatgataagaaagaccagtcgtattttctctggagattggggcaggatgtgctgaaacgttgcattttcccgttgggagattatacgaaggtaaaggtccgtgagtatcttgcggagaaagggtatgaggcaaagtcgaaagaaggagaaagtatggaagtctgctttattaaaggagattatcgtgattttcttcgtgagcagtgtcccgaactggatagtgaaatcggaccgggatggtttgtcaactctgaaggagtaaaactggggaaacataaaggagcaccttattatacgattggtcaacgaaaaggactggagattgctttaggaaagcctgcttatgtgttgaaaatcaatccgcagaaaaatacagtgatgcttggagatgccgaccaattggaaactgaatacatgttggcggagaaggataagattgtggatgaacgggaactgttcgggtgtgagaatttgacggtacggattcgttatcgcagtcgtccgattccctgtcgggtgaaaagattggaagacggacgtttgttggtacgtttcctcgaaacggcctcggccattgctcccggacaatctgctgtgttttatgatggaagacgggtgctgggaggagctttcatcgcttcccaaagaggaatcgggctggtgattatagaaaatgaagaattatgattgattaaaatagaaagataacttatgaagaagtttatagtattgattctcgctctaaatatgtatctgggggtatctgcccaatttactccgggagataccttaaaataccggattagtctgaaagacaaagcggctacggactattctttgcagaaaccggaaaagtatttgtctaagaaatctattgagcggagaaaaaaacagggattgcccattgattctaccgatttaccggtttgcaggacgtatgtagatgccatacgaaagactggtgttcatgtacttgtgaccgggaaatgggataatttcgttactgtttcttgtaatgacagtaccttaatcagcgaaatagctcaactgccttttgtacgttctacagaaagggtatggaaaggtatcacgcaaagagcatttcaaagagactcattgataaataaaccgttgcgcaccgatagcctttacggtcctgcaatcacgcaagcggctatgagccgcgtcgatctcctgcatgatgcaggttttaagggacagggaatgaccattgctgtgattgatgccggcttccataatgtggataagattgatgccatgaaaaatatccgtatcctcggtgtgcgtgactttgtgaatccggaggcagatatttatgcagaaagcagtcatggaatgtctgtattgtcctgtatggctatgaaccagccgcatgtgatgattggcactgctcctgaagcttcttattggttgctgcgtagtgaagacgaatattcggaaaatttggtagagcaggattattgggcggcagctatcgagtttgccgatagtgtaggagtggatttggtgaatacatcgcttggttactactcatttgatgatcctgcgaagaattatagatatcgtgacttgaatggtcattatgcattgatgtcccgggaagcagcgaaagctgccgataaaggaatgatagttgtgtgcagtgccggaaattcgggtgcaggttcgtggaagaaggttactcctccgggagatgcggagaatatcataactgtaggagctgtaacaaaaagaggagaattggcgccgttttcttctgtaggaaatacagctgacggacgtgtgaaaccggacgtagtggctgtcggtttaaattcggatgtgatgggaacggatggaaatcttcgtcgcgccaatggaacctcttttgcttctccgattatgtgcggtatggtagcttgcttgtggcaggcttgtccgaagctgacggcaaagcagattattgatttggtgcgtcagtcaggtgacagagctgatttcccggataatatatatggatatggtattcccgatttgtggaaggcatatcaatcaactcaacgttaactgttcttttttatggattctctttctcttttagaactgaattcactcgtccgccgtagtctggagcaatgcctgcccgatgaatattggatacaggcagagttgagcgatgtccgttccaatacgacggggcattgttatctggaatttgtgcagaaagatcctcgtagtaataatctcgtagccaaagcacgggggatgatttggaataatatctaccgcttgctgaaaccctactttgaggaaagtaccggacaactgtttacctccggtattaaagtgctggtgaaagtaactgttcagtttcatgagttatacggttacagtttgacggtgcttgatattgatcctgcttacacgttgggagatatggctcgccgtcgtcgggaaatattattgcagttggaagaggagggagtcttgacgttgaataaagaacttgaaatgccagttcttccccaacgtgttgccgtcatttcttcggctaccgcagccggatatggagatttctgccatcagttacagcacaatccgggcggattctatttttatacagaactttttccggctttaatgcaaggcaatcaagttgaagagtctgtattggcggctttagaccgtatcaatgcccgcatcaatgaatttgacgtagtggtcattattcgtggcggtggggctacttctgatttatccggttttgatacttatctactagcagctgcatgtgcgcaatttccattacctatcattaccggtattggtcatgaacgcgatgatacagtgcttgactctgtggctcatacccgggtaaagactcctacggctgctgccgagcttctgattcatcaggtaacggaagtagcagagcatctggaagaattatctgtacgtcttcaacagggagcttatatgcttcttgagcaggaacaacgaagattggaggcgctccaaatccgtattcccaatcttgttcaccgcaaacttgcggatgctcgtttttctttgctggcagcaaagaaggatttgtcacaagtggcgaaagcattgttggcccgtcagtctcaccggttggaacttttgcaacagcggatagcagacgcctctccggataaactcttgagccggggatacagtattacaatcaaagacgggaaagcggtgacggacgcatcttcgctgaaaccgggagatcgcttgacaacccggttgctgaaaggagaagtgcaatctgtggtggaaaagtaactatccgtcgactgtgtatttgtaagaacattcatcattaaccattaaatatcaatcatcgtggcagcaaaaaaagaaacatattcccaagcaatggaacgtctcgaaaagatcgttcgccagatagataataacgaactggatatcgacattttgagtgagaaaataaaagaagccaatgagattattgctttttgcaaggataaactgacaaaagccgaccgggaagtcgaaaaattattgcaagaaaagaggctatctgaagaataaaagttatttttgcgtttcaatgcaatagaaaataaactaatacataacaatatgaaagaaatagactgggcgaatctgtcattcggatacatgaagacagattacaatgtgagaatcaacttccgtaatggtgcatggggagaattagaggttagtagtgacgaacacctcaatttgcacatggcggcaacctgtttgcactatggtcaggaagcctttgaagggctgaaagcattccgtggaaaggatggtaaagtacgtattttccgtttggaagaaaacgctgcccgtctgcaatctacttgtcagggaattctgatggcagaacttccgacagaacggtttaaagaagcaattttgaaagtcgtaaaactgaatgaacgttttatccctccttatgaaaccggtgcttctctttacattcgtccgctgttgatcggaacaagtgcccaagtaggtgtacatcctgctgaagagtatatgtttgttgtgttcgtaactccggtaggtccatatttcaaaggtggtttctctaccaatccgtacgttatcattcgtgagttcgatcgtgccgctcctcatggaacaggtatttataaagtaggtggcaactatgcagccagccttcgtgctaacaagaaagcacacgatctgggttattcctgcgagttctatcttgatgcgaaagaaaagaaatatatcgatgaatgtggtgctgccaatttcttcggtattaaagataatacttatatcactccgaaatcaacttctattctgccttctattaccaataaaagtttgatgcagttggcagaagacatgggtatcaaggtggaacgccgtccgataccggaagaagaactggaaacatttgaagaagcaggtgcttgtggtactgccgcagtaatcagcccgattcagcgtatcgatgatttggaaaacggaaaatcatacgttatctctaaagacggtaagccgggacctatctgtacaaaattgtacaataagctgcgtggaattcagtatggcgacgagccggatacacatggctgggtgacgattgtagaataacgatatattatgaaataacacatttatcaattaatattattcactatgttaaaactaaactcagaactgcgtgctcaggcgcgtgaggcacttcaaggaaattgggtgatggcggctgtagctgccttgatttattcggctattgtcagtgcaacaagttatttacctttggtaggaacattgcttgtaggattgccggtggcatacggattcacgattctcatgtttagcgtgataaaaggagcaaaagacattgacttgggaatcttgtttgaaggattcaaagactacagccgaatcatgggaaccgtagttttagtgtttatttatactttcttgtggtcgttgctactaattattccgggcatcattaaacactattcgtatgcgatgacaccgtatattctgaaggaagaacccgaaatgaaaaacaatgcagctatcgaaaagagcatggttatgatggatggcaataagatgaagttgttcatgcttgatttgagtttcatcggttgggctatcctttgcctctttactttcggtatcggatttttcttcttgcaaccttatatgcaggcttctcatgctgctttctatgaagatttgaaagcacaacaaggtggaaatgtagaagtaaacgttgaggtgaatgttgagatttaataacacgaatcattcaatattatagaagaatggagcatagagaaatctgtgctccatttctttttgtcggttgcgtcaaaatcagtacctttgcgacctaatcaggattgatatgggaaagaataaattagaaaagtttgccgatatggcgagttatccacacgtgttcgaatatccttattcggcagtagataacgtgccttttgacatgaaggggaaatggcataaggagttttttaaaaacgatcatccgattgtgctcgaactaggctgcggacgtggtgagtacaccgtcggcttgggtaaaatgtttcccgaaaagaactttatagcagttgatataaaaggtgcccgtatgtggacgggagcaacggaatcattacaggccggaatgaagaatgtcgctttcctgcgtaccaatattgaaatcattgaacgtttttttgccgaaggcgaagtaagtgaaatatggcttaccttctctgatccgcaaatgaagaaagcaaccaagcgattgacttccacctattttatggaacggtaccgtaaattcttgcagccgaatggcattatccacctgaaaacggacagcaacttcatgtttacctatacaaaatacatgattgaagcgaaccgtcttcccgttgagtttatgaccgaagatttatatcattccgatttggtagatgatattctcggtatcaagacttattatgaacaacaatggctcgatcgtggtttagctattaagtatatcaaattccggcttccgcaggaaggtcaattgcaagaaccggatgtagaaatagaacttgatccttatcgtagttacaatcgtagcaaacgtagcggattaagtacaagtaaatagttttgtgcagtaacaatcgcccttaaagtgaactgacacttaatcgaatggtgattttaaattgtaaatagtaaatcgtcaaatagtaaataaaatgactctctatcctaaattgatattagatgcattggcaacggtgcgttatcccggtacgggaaagaatctggtggaagcggagatggttgccgataatctccgtattgatggcatgactgtcagcttctcattgatctttgagaaaccgactgatccgtttatgaaatcaatgttgaaggctgcggaaacagctatccatacgtatgtctctcctgatgtgcaggtaacgatcacagcggaaagtaaacaagctgcccgtccggaagttggcaagctccttccgcaagtgaagaatatagtcggcatatcttccggtaaaggtggagtaggcaagtctacggtgtctgcgaatctggctgttgctttggctaaattaggttataaagtaggtttgcttgatgctgatatttttggtccttctatgccgaagatgtttcaggtggaagatgcacgcccttatgctgaacgtatcgacggtcgtgacatgattattccggtagaaaaatatggagtgaaattattatctatcggcttctttgtcgatccggatcaggcaactttgtggcgtggtggaatggctagtaatgcgttgaaacagttgattgctgatgcagcttggggagagttggattattttctgatagaccttcctcccggaaccagtgatattcatttgacagttgttcaaacgctggccatgacaggggcgattgttgtcagcactccgcaggcagtggctttggcagatgcccgtaagggaatcaatatgtttaccaatgataaggtaaatgtacctatccttggtttggttgaaaatatggcttggtttactcctgccgaacttcccgaaaataaatactatatcttcggaaaagaaggcgcaaagaaactggctgaagagatgaatgttcctttgttgggacagatacctatcgtacaaagcatttgcgaagggggggataatggtacacctgttgcgttggatgaagattccgtaaccggacgtgctttcttatccctggctgccagtgtcgttcgccaagtagatcgacggaatgtagagatggcgccgactcaaatcgtggaaatgcataaataagtggaatctggagttggatagctttgcagtaagttatccataggatataaaacgagcctctgtagtcttttcaaagactatggaggctcgtttatttattgatttttaggattacgtattcttgcaaaataatcttatattataatccgcgtaatccgtgcctaaatatattatataaactaattatgatgacatacttatgtagcaattgttgttggcggattttcctctataagatagtgacggtatcattatcatataccgtcactatctttttaacgttcgaattacttgttcaaagctttcataagctcttttttcatggtgtctactccgggaaatccagtttgtttgaaggtgatattaccctccggatcaacaataaaataagtgggaactccccggatattgaagctggacatcagaaaactccattgttcatttgtcacacggaaatgctcaccatgaatgtcggtaatcatattttcccaggtggctttgggtgaagtttcgcctgtgatgtagaggtagataatatccttgtcttttaattcctctttcattggagtaatggctttattggctgtgcgacaagggccacaccaagttgcccaaaaatcgactaacaacgtgtgtccacggaatttagagataatggatgggaataagtcctcattggagacttgtcccgtctcgtttacagtgaagcctgtctttcttttgtttaattctattttctttattatttctttgttcgtttgagtaagcatctctgcgtatgccggggaagaaaaagtttttagttcggcattctgctctgttgttaacggggtaaaatcctttatggattgatacagcttattaaatttaatgttatcgaataagggtccctgtcccgttcccagtgtctctttaagtacatctaaagaatttggcagaaaacttatcaagtatattgttgatgcgtaatatttaccgtatagcgctttcagagtgttgatagaagtgaactctttcaatgtgtcatagtattctgtaggaatatcaatgcgggtattgtagaaatagtcgtcagtctgttctttattcagtttattaacagcgatatatgctgattttagttctctctccgtcatggcgattttaccagtcgctgccagatctacctgaatatttaatagctctttacacgcattgctgtatggggattgtgcaatttcttttcgaatggatggaagacgctccaatacataagccttgtattcatctgcgcttttcccggcaatgtcgttatacatatccatgtaataaactcttttcaacacaatatctatatctacggaagctaattcttgttgcagactagccagataaccattaaagtatacaggttctccatacgttttatcctttttttgcagatgcgcctgtctacggcatagttcctttgtattgatgatgagcgatgtctcttcgttgggagctatcagacactcgatccagccaaaaggaagttctaatgatacacttgtaacggacgttattttgacctccgcctgaaaagtgccgtcttctttgatctttatgatattctgttcgttgtggacattcaatgcagggctttctatatgcatcttcatttgttgcatcatctctttctgatagtccagcattttccctttgagtgtagcagtcccataaaccaactttggagtaggcaatatcgctttcttgtttattttgtgtacgactgcttctttgggaagtttttgtttatagaatgtatctttgtctaattgtattccccatatcttataggccccgtcgaagtccccttccgagaaatccagactggttacattttcaggtattgggggaaataagagttgaaactccgcttctcccgattccggcatccagaattccttatccaatgtgattccaactccctttcggataggataaagcattccgttattatctttcagaaaactgcccgttgctattttaatccagtatttcggacgataaaaagcctttatatacactgttgtcacggtatcactcatgacaattttatcaatctcaatactattggagctccatgctagaaaaggaggccgctcgataactctgtctttggcttgtatggtgcagattgtgcagaatattaaaccaataatccatgcgaatcttttcatgtgaataatgttttattacacgaacaaatataaggatctttttataactatccttgcaaaaagctgaaaaagaaatgactttttacggcaccggggaaagatatgtccggcaccggggaggagaaggttcccccaccgatgaacgccccgttcctcaccgatgaggaaagggagcggtatcggggaagttatttattgtaaccggaacgtgatagggagggtatacttaacaggaacagcctgtcctttttgcattcccggttcccatttaggcatgttgcccactacacggatggcttctgcatccagtgacggagatacgctacgtaatacttttacgtttgacaaactaccgtctgttccgataatcatttgtatgattaccctgccttgttctttgtttttttgagcaatgacaggatatttgatacttctagcaagataacgcatcaacccggcttgtccctccgggaatttgggcattgtttctactacagtgaaagcctgatctgcgttttctcctttcacacctactgcaccgggagttgaatcttcctgtggaccgtatcccactacaactacttcgtccagatcagactgtttgatctcttcggccttgggtggttctggatcggatagtctgaaagcaacgggaactgtaaatcttacatttactgcttcccctctttgtttgccaggttgccatttaggcatggcagcaatgacacgcatggcttctttgtcgagatacggattgacacttcgttctacttttgtgttggctatacttccgtcctttttaacggtaaagcttacaattacacgtccttgtatgccattttcatgtgcttcagccggatatctgacattcttcgacaagtaatccatcaatgccttcatccctcccggaaaatccggcatttcttctacaacctgaaagacaactgaatccggtacactcttgatttgtgtttccgttacttcctttccttttgtaccttgcggaagagtgattttttgaatttctcttgtagaaagttcgggaatatttgtggtttcagcttgcatggcaacttcttccgttatttgtcccatcatttcttttgcaaatttttcagtagtacgtgctaccatttcgatgttactgacaatcatcaagatggcagccaagggaagaaacatcagatattttgttcttcctatttctttcgttcttcgtttattcatcattttaatacgatttttgagtggtaaaacattgaaactatttgataaatttgctgcagccttgtgatgtgccagtcccaataagtggtactggtatgatttactatcatgtcccgtctctaatacacgatggtctgccatgtattcgaggtttcctctgacttctcgtttcattaaccagataaatgggttgaaccagcagaatatgcacattatttcgctgaaaagtacatccaccgaatggtattgacgggcatgtgtctcttcatgcgtaatgatttcactgatttcagattccgtatgtgattgcgggtgtatgaatatccagtggaaaaaagaaaaaggacctgtttctttttttaatagatgtacgcgtactccttgtatattgctttttgagcattggaaatgcaatcggatgatgctacccagttgtacgaagaaacgtgcggtaagtaataacattccgctccaataaataattttagcgaactgtatgataacctcttgccaatttatgacagtctcttgtgtaggagtcacaacttgctccggaagcaggatggttgcataaagatctgccattgccaccatcggttcgtgagcttttatccatccctggatattcagtagagggtaaagcaaagagatggcaaagaaacataacaaagccattctgcgccaatggaagaaggtgtctttgtgaaaaaacaaccgatagaatgcgtagaacagtgctatcgctacatttatctttagaaaataagctagttccggagtcatgatgatgaatgttttctattaatcttcttttcctttttcaataagatcgataatatctttgagatcatcggccgaaatcttccggtctttggcaaagaaagaaaccatttctttgtaagagttctcaaagtagttacgaactacaccgctcatgaaatgacgtttatattcattttcacgaatggcgggagtatattggtaggtattacccacacgtttcggcgtgacatatcctttccgctcaaggttctttacgatagatgctactgtggtataaggaggtgccggttgcgtatactttgcaacaatgtcttttacgaaacagcattgtaactcccaaatgtagatcattacttcttcttcttgtatagttaacttttccatggagatgttgtttaattacgaatacttcgcaaatctacgaatatttcgtaaatacgcaatagttagtcggttaataattgtaaatgtataaatcttgcaagaatattttaattgtgatatgatcctgaaaatatttaggcataaaaacagaccggatgagcattgtttttgcctaaatagtcacactttaataacatttatgcaaaaaagagagtatctaggatttttttatataaaataaatgaaatatatttgcggctacaaaatatacgttaaatgtggaagggtgcgtttcaatgctttaaccggttgcgaataattccccgcacttaaaacaaaactattaactaacaatgctaaccagagggaagaggaaggcaactaaaaaatgaatgatatgaaaaaaggtttgatttttgtgctatttgcacttgtttctatcgtttcttattctcagatttcttggaatgccaaagtaggtatgaatatgagtaatcttacaggtgatgtagacacagacatgaagattggttttaatgttggtgtaggtgcagaatatgcatttacggaaatgtggtctgttcaaccatctttgatgtttacttctaaaggttataaagctgatggtgtgaagtgtaatccaatgtatttagaattgccgatattggcagcagcaagatttgccattgctgataatcagaatatcgtggtaaaagcaggtccttattttgcatttggtgttgcaggtaaatataaatatgatggagttgatgaaaaggatgatgtttttggagatgatgggtggaagagatttgatgctggtctcggtgtaggcgttgcttatgaaattaataaattctttattgacttatctggagaatttggattaactaaaattgctgatggtgacggcgctccgaagaacatgaacttctctatcggtgtaggttacaagttctaaacttattatactctctttataatatctctaaaatccctcgttctatactctcttggaacgggggatttttatattcttattcgaaaaaaaacggcataccctctatggaaaggatacaccgtaaactctctctcttgtaattttcactcattaatcacttatctgcttggataagttttctttctcttttaattctttgtatcgctctattgcatgtttgcggctcattagtatttgccagcggtatacccaacaggtggtaaggaaataaatgccggcttgcaaccataaagctttatattcaaaagctacttcactaagagtagctcccatattattgatttttacaaagccgttaattccaaaggtagaggggaagatgtaagatacatacttccaaaacgggggaatagctgctcccggccaagagattccggaaataaataacaaggggactgacgtgaatacaaaaatcagcatacacgtctcccggttgcggatagcaatggaagctgtcatggcaaagaaaatacaagccgcaaggtaggggacaacaaataatactaatgaactgggttgtccgatctggttgaggctaaataatcttgggaccacataaagtacgtagaaagctaccaatatatagaccaagaaataactcaagccttttcctaatacaattcgtagcgttccgttgtaatgacggttaataggcacgagatccttaaacctgttattttcacgagctgttcccgcagcgagaccgataccaagtaataatgtttgttggataattaatactagtactgcaggaattaggaaagcagcgaatccggtagtcgggttgaagatagagatttcttcatattcgatcggataagcggtgatttcatcctgccggtcggttgtatttccactgcgtgcaatcttgatatccttattcatattcagagaaaccgctgtgttggcaagaagcatcgatttataatacaacaatccgctcatgtcgcaatagatgctcacttgtgtctgttttcctttggcaatattgtcactaaaatccgaagggatataaatgatgccgtatgcatgccggtttttcagcatttgtttggcctcttccatatcggcacagtaggagacgattttaacatcgggcgtagcatctaccttgcggagatattcgcggctaagagatgaatgtgaatcgtcaacaacaacagcaggaacttcacgcactacttcgttatcatagatgaaactatatagcaacggataacctaacgggacgagtataaagaatatcagtaccccctggtcgcggaaagttgtctgaaactcccgtttccagatataaaacaggtcattgatgccttgagctatcttatcttttaattttatatctttcatttagggtatatatttatagtaaaccaatgcttccttcaggcggtgaaccacgaagaaggggagcatcatgaatattaatagtgccatatagttggtccatgagtaagccatactatatccgttgagcgcctgatccacgtaaataaggaaatagtgccgcaacgggaatagattgctcaaagcctgtaaaacaggatgcatagccatgaccgggaatgaaaatccggaaatggagaacgatatgactccccacagggaagcaaaacttaatccgagtcgtagagtcggcagggttcctatcatgacaataccacaacattgggatgccagtacaagacagagcgtggcaaatatcatcggaaatataccgctgttgcaaggaaaatgcaggaatccatacaggtatacattatagaatatacccataatgaaaaagactacagtgtggggaagcaacttcccggccaatgcaatataaatggagttgttactcattcgtaaccattcgcgagccgtacgatctttgatttctacaccgattgaatagacagttaccataaatattaatagcatgagtactcccggtatcagtgtattgcataagtataccgaatagtttagccacggattattcagtgggtgtgtatcgataacaatcggttgcagatatgccatagcctgatcctctgttgcacctttggcatataacatggtccttgcagcggctcctgaggtgagttctcccatcattttcatatccctgaacaatagagagcctgcaatcaggtatgagtaattggtatagaaagagatcgttggctgccgttggctttgtgcctctgccgataaacccttggggagatagaagaacccgtagatttttccctcctgcatggcaatacgcgcatctgttacattgctgtaatgagctacaacccctgtctgcgaaaaagcatccagattgcggacaatattacgggaagtagacgaatcatccatgtccaccactcccgcaggaagatccttgggaagccccgaatccattaaagtggtgaagaatatataacaaaacagcggggcaatgaccatacagaagagatagagcgggcgtgataccaatcgccggcactctctttgcataacctgccacaaagctatatatttcttttctctctctttcatggttacttgtcaatgataacagacatacccggacggagattttccactttctctaccggagaagctttcacctcgaatgttttcagatcaaattgtccggtcgttttggttgctttccaggcagcataagtgcctaagtctttcagataatatactttgagctggatctttttattatccagagcaggaatgatagcttcgaactccgaccccatcgtcaggttcttgagcaaatcttcgcgtacattgaatgttacccacatatcgttgagttcagcgatattcatgatgggagcaccagtacctaccaattcgcctaccttcgggaaaatctctgaaacttctccggcagccggagctatgagataagtctcctttatgtacgattctacttcggcaacagcaccttttgcccggtttaccaaagcttccgcggccatcttgtcttcacgttccgctccgttctttgccatagtatattgcgctttggctgctttctctgtagcaatgcttgcatcccgttgcgcagtgacttcatccaatttctgtgcaggcattactccctgctcatagaggttctttacacgttgatatgatttttcggcaatggtgacgcctgcttgggctttttgccacatttcgtatgctgcctggatttgttcctcacgcgcgcctttgattgcttttgcgttttgtgcctgtgcggcagcttcggcagcacgtgcctgttccatttttgccactacgtcaggagcttccaaaatagccagcgtatctccggcattgacactttgtccttctttcacgcgaaattccaatatacgtcccggaactttgctcgaaacgcgatactcggtaacttcagcctgtccctgtataatttcaggacctttgcgaagcatgaagaagccaacgactgcaacgattgcaataactccaagtagagtaaggaatgcaagcagcatattgctgttttgtgattttataggtgccatatgatttatgaattatgatttatgatttatgttttatggattgtgagttggttagggattgggttgtttctgattgggttctttactttatttttctgctttttatttatttcagtgttcccagagatttcttcagatagatttctgttaacttcacatctatttgtgcgtcaatcttttctgaatgagcggacagccatgccgtttgtgcttcaagaacattacttgtggcaatcactccctctttaaaaccaagcgttgcatagcgcagattctcttccgctttttccatgtttttggaagacataaccagtttcttacctgcttcttttaccttgaaagcggcttgattgacttgcaactctattttttcgcgtgcgtcctgaagctggtattgtgcaatgcgggcttcggcttttgccgctctcgttttataaataccttctccccagtgccatataggtatctgtaccatcactcccacattccacatgcctttgaatttgttttcaaagctgttgaagacagaagggttggttaccatataattccccatcaatgcgatagaaggaagatgttcggcacgggttacgtttactttctgtttataaatctgtgtcgctaattcgagactacgtatttccggacgattctcataagcggtagataaatcgaaatgagggtctgttgtcagtaatggaatatcttccatattttcatctgctagcgtgatgggggagctaagatcaataccgcatagttggcacagcaacattcgggcaaggctcaatccatcttccactttggtgagtgtcatttctgcttcattcaccttgacgcgtacagacaagccatccgctttggtggctactccttcattaatcattttttccacatcaccgtccagctgttgcaagagctttaaataaccttccgccaacttcttcttattaaccagcgaaataacttgccaataagcctggtctgtactcatgattacttcctgcatgccaccgtggtgttgttcttgagccaactcttcggcatactttgttattttgttgtacgcccggatttttccacccatatataaaggctgtgtcaatgtaagagcacctgcatagacattcctggtgtctgtgcggagcgcatccactaaagagtttcccgcttggtcgagagcaggcagagccgctcctagttttccgcttaaggaagcaataagtggttttaattcaggatgtgctgttgcaatctcggttgcagcctgttggatagggcctgccagattagttcctagtcctgaaagcgcagctttctggtcgttgtttaataatgaaaactctttctggtttctcatgtaagctccggttgccgagaaattgggaagataattcgtaaatgcagctttccgttgataatgagcagcatttatcttctcattgcttatcaacaaatctttgttgttggcaagagctaatgcgcggcaactatccagacttagaaagttctgcgcttttcctatgaaagtgagacttagcagaattgtcagaagaaatacttttttcatcgcatcttgcatattaataaggtgatacttctatatttaataacccggttcttatgtaatttgtttattgaagtagtctgtttttttgtacttgtttacttaaacaataattgcataaacaacgatgcaaatgtatgtgctttctgtgagaactcaaaacgaattagctttttttagaaatatagtggggatggattctgttgaaaagaaagaaggctattcctcatggcgaggaacagcctttcttgatatataaagtaaggggattttaattacagagcacctacttctttcaaagcagcgttagttccgtgaacagcttttgcgctagctgcgaacttagctttttcgtcttcgttcaggttcagttcaacgatcttttcgataccgttcttgccaaggattacaggaacaccgatgcaaagatctgattcgccgtattcaccttccaataatacagaacaaggaaccatcttcttttggtcgtgaaggatagattcaactacgaatgctcctgctgcacccggtgcataccatgcagaagtacctagcaatttagtcagcgtagcaccacctaccatagtagcagcagcaacttcttccaatttctctgcagagatgaaattagctacaggcatacctttgtaagtagcgaaacgagtcaaaggaatcatcgtagtatcaccgtgaccaccgataaccataccttctacttcgttagcgttgcaaccgatagcttgagacaagaaatatttgaaacgagagctatccagagcaccacccataccgatcacacggtttttcggcaagcccagagctttcaatgccaaataagtcattgtatccattgggttggagataacaacgatgatagcgttaggagaatatttcaacaggttttctgctaccgatttaacgataccagcgttcacaccgatcagttcttcacgagtcatacccggtttacgaggaatacctgaagtaatcacaacaacgtcagagttagcagtttgagcatagtcgttcgtgcagcctaccaatgtagtgtcgaaacccaacaattgagctgtctgcatcatatccattgctttaccttctgaaacgccttctttaacgtccagcattactacttcgtctgctacttcattaaaagcaagtacatttgcacatgtagcacctacgttacctgcgcctactacggttacttttgacataatactatatatttaaaaagttgataatttgttttatcttttagcgcgacaaaattacaacgataatcctaattaaagaaatttttccgtaataattttagttaaaggtcgaagttcccgataatatataggtatgataaaaagtttgggtggaagaagctgttttttgcatggttatatacagaatgtagctgcgtaagaatgtactattatggcaaatgattcattcagctatttttttataattgcttgtctattcggagttacttcgttcgctactattatttcgttccactatagtgttccgcaagaataactatagtgtcccttacggataactatagttgaacgcaagagtaactatagtggaacgaagtaataataagcaatgagattaataatattaggcagagaaagaaataacgatagtatcttgatggagaatttttggcaatacctttcaaccgtatgcttgattcatttttgtatggaaaaagaagataccagttaaagtggcagggaacctggcaagttttttaaataatgaacgaataaagtccgaaagcttattatctttgtgccaatctgttaattgaaagtttaatgaactgctgaaaatatcgaaaatatcaaaatgaagttctgggaatcaaatcatcaatctgttcaggaaggggatatgcaatttattgcactttacaaattctactatcaagatttgtatgcttatggagtgagtttggggttcaataccgaagatgtgaaagatgcaattcaagaagtatatctaaaattgtatttcaatgagcgcctgtgtattgatgagaagaaaataaaattttatttgttgcgttcggttaggaatcagctgattgattgggagcgtacaaagaaagatacatcttctatagaagaagaggaaaggagttttaaattatccgtatccgttgaagaaagctttatttctgatgaagaagacttattactgaaaaaaagggtgaatagaattcttgatttgctgacagatcatcagcgggaaatagtctatttacattttatagaggaaatgccttatgaagagattgcggtaatgctggatatgaaaattcaaacggtgcgcggacaagtctttaaagcgatggagaaattaagaaaactggattcaaaagattattttctgttttttcttatcttatacctgcatggcgtttctgtctttaaataattgaaaaagagtattgtatacggaaggtggggagcgtaaacctatacctctctgcttttttatttatttttttgaggaaaaaaggagatgaaaggcatacgaatctcgtatatatagtaaacaggtctttaattgaaataaataatgaaagaatattcatcatatactacagccgattttttgaacgatgatttatttcttttctggtattattccggagaaggagattattatcgaaaaatcattgccgattgtcccgatcgtgagccgtatttaaaagaagcgatggagagactggcggcgttgaagtgggaaaagccggttttacccccaaaagaagtggataatgcttgtttgaaactggaacaagccattcaaaatcggaaaatgtctcaacgtaaacatcgattgtataagatgagatggtggagcgcttcagttgcggcagctattcttatcctgtttgtttcggtagaggttatttggaaaagtgctccggcaattgattatctagctttgttgcaagtgaatgactctgtgtttatgagtggtaaaacgcagctttttgttgacgatcagttgaaagaaacttttgaaggtaatccggatttggcttacgatcaaatgatgacagatgctggtgaaggggaatttaataaattagttgtttcgtatggcaaacgtgcccgtgtcactctttgcgatggtacgaaaatatgggcgaatgcaggaacggtgcttctatatccaacacattttgaggataagaagcgtgaaatatatgtagatggagaaatatatattgacgtgactcctaatccggagaaaccttttattattaagacgtcggatatgggagtaaaagtgttgggaacttctttcaatgtttcggcttatcgggaagatgtagagaaaagtgttgtgctggttacaggtaaagtggaggtaacagcatctaatggagaatctgtacgtattttacccaatgaccggttcaggcaatccactgataaatatgtggtagataaagtgaatgtggaggattatgtgtcgtggaaggagggacgattatcgtttaaaaacacagagcttggcggaatactcaaacaactgtccagatactataacgtaagaattgattatgataaacaacaacaaatcacttgtagcggaaaactgaatttggacgatacgatcgaacagatattgaatactatcacagaaacggctcctgtggtaataagtaaggaaaacaatgtttataaagtaacaataaagaaaaaatagcctatgattaatatgtgaaaaaccatactctaatttatccttttgagagggaaaggataccagccagttttattcgtaatagaatagccttaaaatattgaagtataattttaattcttaaacagatgaatgaaaaacatcaaaaaaagaatcacacttgcctaagtgtgagaaggccctttatatgcttttttctagcattgggtgtgtttctgctatccgcttttcctactgaattgtatgcccagaagaaaacaattactttggactataaagagttgggactaatggaactttttaagaagatagaagaaaagagtgattatgtctttttctactatgacgtattgatagataaggatgtgaaggttcctgcacgtttcaaaaacatgacagtagagcaaattctggataaagtttttgctaacatggagcttgcctatagcattaataaaaaacagataactattaaaaagaaagtattgcaggaaaaaacgaagaaagaaggtcaaagctctattgtaaaaggagtggtattcgaccagtctcgtgaaccgttgcccggagttagtattgtagtgcaaggtactaatatcgggaccgtcagtgatcttaatggagcttattccattcatgtgccttcggatgattcgaagattattttctcctatataggtttcgctcctgtgacttattcggcaaaagaaatgaataagctgtcagaagtggtgttggttgaagatacaaaaacaattgatgaagtggttgtggtaggatatacgacccgtacacgtgagaaattaatcagttccgtctcgactataaacaatcaggaattagtcaagtccacagtccccaatctggagaatgcgttgacagggcgtgtgtccggagtcttttcccgtcagactagtgctgaaccgggttcagatggtgccgatttgaaaattcgcggttttggttctgctttggtggtagtagatggtattccgggaagaaattacagtgatatcgatccttccgaaattgagtccgtttccgtattgaaagatgcatcggctgccgctgtttatgggatgcagggagcaaatggagttattcttgtaacgactaaaagaggaggaaaaaacaaaccgacgacattggatatcaatacgcgcttcggattgcaaatgcctcataactatccacagcctgcatcaacctcgctgtggcagacattagtcggtgaatattatgctaatatgaaattaattaatgataagaacgcggtaattactcccgctgatatggctacacgtgactatgcttataataccaattggtatgaggaaatgataaagaacgctcccatcacccagtccaatatcaatatttcgggaggcacagataaagtcagttattttatttcagccggctatttatatcagggaggtatttggtcaacaaattctactgataagaatcgtttcaatttccgtagtaatttggatgcggatatactgaaaaacttgaagttatctgtcggagtgggagctgtcattaacagtctgaattatccgagatccgcttcgtatgagatagcccgcaaaatgaaagatatggctccgaatattccggtaaagtggccggggcatgacgactattatgcatttggtggggaaggtacggtgaatccgatggcattggcggataaagaggcatccggatattccaagaaaatagccaagaatctgaatgtggatttttctttagagtataaggttccctttgtagaggggctttctttgaaggctacaatgggatatacgcaatctgattcgtggaataagaactggaatatgaatatcgtttatatgggctatcgggaggatgcgcaggaatattatgagagtgcttccgcctctaatgccaataaagcaagtttgagtttggaagatggtttttcctataatataaccggacaaggttttatcaattatatccgctcgttcgggaatcataatataaacagcggactggtctttgaattctcggatgcggaaaaccgttctactgttacgtctcgtggagaatttccttctactgtgttggatatgatggcgggtggaattgccaataaacaagtgacaaatagtgaagttttccgtaaatacaggacggcttctttcatcggtcgtttctcttatgattatcgttccaagtattttgtcgatttcaacttccgatatgatggtgcccagtattttgccgataagtggggtttctttccctctgcctctgtaggatggatgctgacaaacgaagagtttatgaacccgttgaagaaagttttgaatgagtttaaaattcgtgcctcctggggagaattgggtgacttgtcggctgccagtcaatattatgctaataatgagcaatactattttcaaagcggatatcaatatccgggtactccgatgaattttggtgaccgcaccatttatggattaaatcccaccttgaatcctaatccggattttacatgggctacctcgtcaatgataaatgcgggtgttgattttaagttgtggaatggcttgcttagcggatcggcagatgtgttctatcgtcagcgtaagggacttccggcacaaaaggccaatgataatgcaggagcattggctacttggtataacttagaccatgacaacacccgcggttttgagttctcattgaatcatcaatataaaataggagaagtcaactattttgtcggaggaaacatgtcgtggtccagaacccggaaagggaacattgagcacggaagatttacaagcggttatgacgaatggaaatggaacactgaaggacattggaataacgtacgttggggatataactgtattggacgttatcagtcgtatggagaaatagccaatgcacccatgcataataattcgaataataacagtgccatattgccgggtgacttaaagtatgaagactggaatggcgatggctatattgacaattatgatcaacgtcctatcggaagaaatgcttatccggagttggtatatggtattaatctgggactttcctggaagggagttgatttctccatgttctggcagggaggggcattgtcggacttccagatcggtgctttcgatatggatgctttccaggaaggagctactaacttgaacacttgggaatattttggcgatcgttggcatcgtgccgattatactgatccgaattctgaatggatacccgggtattttccggcagtccgagattttacatcagtaacgatcaatcgtctaagttctaatttttggatgtggaatggaagttacattcgtctgaaaaacgtggagttgggatatactttgccacaacgaattacccagaaagctaatatcaaacagttgaggatttatgcgaatctttataactgcctgaccttctcctcacagaaattctttgatccggaacagcttgaaagtcagtattcgtttgccagctatccgcaaatcatgtcatttaatgtaggtataaatcttaaattctaacaggttatgaaagtaaaatctatcatatatatggtattggcattgagcttgtgctgtggatgtagcgattggcttactgtcgattcgaaaaccattcttagtgaagaggacattgccaaatatcccgaactggcagaagcacagttcttatccaattatgcggaattacgtaaatcaatccattgtatcggtgacggagcaatgtcgtacaggcaacatcatctggatgcttttaccgatgatggagcgagcaatattacgtacgagaatggggttatgagaaataacactccgggtactgtttttggaggagtcttttctcaaagcaaaggtgaaatatttgaggcggtatggaattataagacaatcaacattgttaataagtttatcgccacttataagaattcggataatgaaggggtgttgagtacagtcggtgaggcttattttattcgtgcttatctgtattttgagatggtgaaacgatatgggggcgtgcctttgtattcaagtccgttggatgatgtaagctccatcaacaatcgttctacagaggaaaaatcctgggattatataaaagataacttggactcggctcttgtattgcttccgaaagtacagcgtattgcatcagaagatcgtgaccgtgccaatcggtatacagctttggcgttgaagtcgagggctatgttgtatgcggggactattgctaagtatggaaaagtttcaaataatagtttccagggaatccgcaaagaaatggcgaaaacatatttattggaagcggcaaaagcagcaaaggaaatcgttgatgatggtaagtatgcgctctctactgaatttggcgatttgtttaatggaaaagatgaaaataataatgagataattttccgttttgctaatgttgccaagacaggagtggctgtatatgaggattactggtatcagtcttatcgtattaaacgggccggttactgtgcctttatggttcctcctttagatgttgtcgaacaatttgaaacattagacggtaagattcagccattggattatgccgcttcaaagaataatcccgaagatttttttgcaaatcgtgataaacgtctggatgccactgttatttatccgggaggagagttcttgggagaacgtttctctatttaccggaaaacactcgtaaaaaggacagatggaactactgaagaatattcttatgaaaaatctgaagattggatgggagcggggaaagtgcccggtcacgaaaaatacatgaaaagtggagcagatggtatcttcttgaacctttccgccgcaggaactactaactggggattttttctgaaaaaaacactgtatggagtgaagaggttggatgattatcttatacaagaaaacgatcaggatgctgtcgttattcggtatggcgaggttattttaaatttggctgaagctgccgttgagctttcaacctatggagtgaatgactatttagcggttgcccaagtcgcttttgacctattgcgtagtatacatggaggattgcctgccaaaacgatggacttggaggttgtacggcatgaacgccggatagacttgatgtatgaaggattccgttattgggacttgaagcgttggcgcattggggaagaaaagatgcacaataaaacgttgaaggctctctatcccattcttcatatcgatgaaacaacttctcctgcctccgtttattatacgttggagaaagtagaagcaccggatttggctacgagagtgaaatggttcgaggaaagagactattattgtccgcttcctttaagcaaaagcccgggtatcgtgcagaatgacggttggaattgataaccctaaaagaaaagaatatgaatagagctagattatatataaatatcaaactgttacttttagcagtgttaacactgaatctgtcagggtgtgaacttgacgaacgtgtggatgacttgaccggtggctacgaaggcgcttttattgacaggctgaccggtgaaaaggtggctaccgaatattatggagctaaattaaagttacttgatctggagtatggaaatgtagcggttcccttggagtataacacacttcctgaaggaacatatcgcaataccaaagtatacccttcccgctataaagtatgggcgaacggaccgttctttgagttggataccatttatggtgatattcgtagttttaagaaaatggacttgattgttacccccaacgtaacattgaaaattaagaaggtggaagtgttgtacggcattacagcgaacgtcacttttacttatcaggtaaatgacgaacgctccaagaatcaggaaataggattggtatatggcaaagagcaatatcccggacaacgtacggctatgaatgaaagcgaaagcggttcacatacttacaaacgaataaagaagaatttgacagaattgtcgggagaatttacggagactctgttcttaaaccctaacagcacatattatctaagagctttgggacgtacggaatcagcaggagattactggaattattcagaacagactgtgattaatacggcagatattgatttgtcttccttaccgattgaagccgctgtcggagtaagtagtgccacttctgctgttttgcagtgggcatttcctcccgttgttgacgagataaaggtttcttatacggatcgggatggtgaagaggtgatggataaatttaaacctacggattattcatacgttgccaatttacctcataatcaaaagagtacaatcaaagtacaacttctggcgaaaggagttgccggtccggaacaaacgattgaaatacagactaaatctttgacggataaatatgtacctgcctcaaacactcgtccggaaaatgttcctttctacaatgattcggaatttaaaaaatcattatccggtgaatgggcattgatatatggtcctacaatcggcgaagactggtccactaccgatttacgttttgaatatttcgattggtgggacacatggttgataggatttgccgaccgtatgcctgcttgccaggatatagagaactttaaatcactgacgattcagggagaaatacaaacgttggttgatattttaccttttgttaatctggaaacactttctatcataaagggtaaaggtttctcggtggataaaacgattaatccgaaagttgacctgacagttctgaagaaactgaagaaacttaacacagttattataggaccggatgtgccgcttactaaaaagaattttgatgatgcgggacttacacatctgacgattaccaactaggtcggtaatcacactactccctttgacaagcgaatgtgtctagtgggtaacatcggatacattcgtttttttaaagaaatatataaatgaaaatataaatagtatgtgtaagattaaatgtttatttctactgatgttgatcgtattgtgttcttcctgcaaagaaagtacagaagatgaaaaagcgatgcaacagatggtggaacgtttatttccggagtatgcttcccaatttagttttgaacaatcggaaaagattgataaagattggtatgaaatagaagcgcaaggaggaacagtacgaatacggggaaataacgcaaattcgatggctgtagggctgaactattatctgaatcattactgccttacctctgtttcctggtatgtgaatgatacggtggagatgccggaagtattacccatgccaccggcaaaaataacttcgactgcccgttgcaagaaccgattctttcttaattactgtaccttcggttatacaatgccatggtggacatggaaggattgggaacggttgatagactggatggctttaaatggaatcaatatgcctttggcaatcaccggacaagaatctgtctggtatcgcgtatggacgaaattaggattgacggatgaggaaatacggaactatttcacagggcctgctcacttgccttggcatcgtatgtctaacttggattattggcaggggcctctgcctaaagaatggctggatacacaagaagcattgcagaaacaaatcgtagcccgtgaacgtcaatttaatatgcgccccatacttccagcatttgccggacatgtaccgtcggaacttaaaagaatctatccggaagctaagattagccggatgagctcttggggaggtttcgaggataaatacagaagccactttctggatccgcttgacccattgtttgcaaccatacagaaagagtttctggaagaacaaactaagttgttcggaacagaccatatttatggggcagatccttttaatgaagtagcccctccaagttgggaaccggaatttttagccaattgctcgaagcatatttatcaatcgatgacgcatgtcgatccggatgctacttggttacaaatgacatggttattctatattgaccgacatttatggacaaacgaacgggtagaagctttcttgaaagcagtccctcaagataaactgttgctactggactattattgtgagaatactgaagtctggaagcagacagatcggtatttcgggcaaccatatttatggtgctatttaggaaatttcggaggaaatacaatgcttgccggaaacaccaaagaagtggggaaacgaatcgaaaatgtatataccaatggtggagaaaacttttcgggactgggttctactttggaggggtttgatgtaaatcctttcatgtatgaatatgttttcagtaaagcatgggattgtaatctgccggactctgtatggatagaacaactggcagacaggcgaattggcttgagaaaccaacaaatgcgtcgggcatggaaattgctttatgacagtatttatacagcaccagctgctttgggacaggggacattgatgaatgcgcgtccttgtttaaaaggaaatggcaattggacgactacgtctacggtagcgtattccaatgaaactttgtttgaggtatgggagatgttgttgaaagccggagaacatcgacattctgcttatgaatatgatgttgttaatataggaaggcaagtgctggggaattatttcgggaagcttcgcgatgaatttgcggaagcttattcccggaagcaattaccgctattaaaacaaaaaggagctgaaatgaaacaactactgcgtgatgttgatactttattaagtacacaatcttcttttttactgggaaaatggattgaagatgcccgttcattaggtacagacggagcctctaaaaattattacgaagaaaatgcccgtactatcgtttcaacctggggagataaagatcaaagtttaaacgattatgcaaatcgtacttggggaggtttggtatcgggatattatgcgcctcgttgggaaatgtttatagatgaagttattcgctctgtttctaacaagcagccgtttaatgctgatgcttttcatcaaagagtgacgcagtttgaaattgactgggtcaagtcacatgaatgttatccttccgaaccggttggtaatactgttgagattgctactttattgatgaataaatacaaggattcaattttaaaagaaaaacacaatgagaataattagttatatttcaagtataatcatcactttttctgcattggctatcatgagcggatgcaaagattcggaagttgttgatgacggctttcgtacaacaatggctaaagcctctgatgtgaaattaaataaagttgcctattggccgggagatcctgtaaattgctcttttaccttgaaaaatgaaacgaactatccgatggatattcgtgaagtaaaagtggtgattcagaacttggatgatggagggtgtgtattgacagaaaagtctgttgcttcccatattcaaatagaaccgggacaatctgttcctgtggatgccgggacactgtatacccttccagctgcattaaagccttcttccttttgtgctgtcaagttcctgttagattttgaagatgggataaccactacaattgacggaacatatttcagagctgtcaacgagcagtcgctgttgacttacgatattcaaaagttagattatcagggacttcctgtttatcgtcagataggagatatgagtgccgggttcggtgtgttaaaaacgatggttgctttcgatcaaggaatggctgccaccatggaggaggctccgcagggtggtacttatccggttgcgcctactccggagtttttgcaacgttccgttcgcaaaactgttgagctttacaattcggagatcggggctgccacaaagataaagagagtggtggttggaacggggatcgcatctgtttcttactttgcaacaatgatgggggcagcctatttacctattcattatctggtatcggctaattctgcttctgaagtacaagctatactcgattattccaatcaaaatggatatgcctcttatgccacattgggttatgacggttctatgcccggagtgggagttgcctggataaaattattggatttgccggaagaatataagcaatttataaaagatcatcaggtggaagaagtttatatttatggagtaggtcaggaaggacatggagagtcttattcccgaagggttttgacgcagaatacaattaccgatgaatatgcgcctggttctttatatatattgtatactaactttggttcggatgccgatattgacgcactgaaacatcggttgtatgactataatcagttaaaattgggtgaaggacaatatatctctgattgggaaagtggaattgtcgatgatcagatagccaatatatccggctctgcgcaagcgatggcaaatgtgaaagcttatacgattgagactgatgatatgatggctttgtacaatatatcttctttcctgacgcttcaatatataaaaaagaatcaaagcaagttgcaggcaccttttgtgaatggagttatttttaacgagtatcttacgaatcaccctcaatatgaagcgtttgttggatatgtacctttattatattggcaatttaattcggcggcttctacagtagaacgtattgatggttatctgaagccagctattgccgggtattttcctgatgttgtcgatcatctgtatgagggatctttttatctgaattctaatatgagacgctatgagttttatgacgagctgatagcaagaggtgtcacttcggagaatattagaattaggcagagtgtagataaatggaatccggaagatgatggagaaacggaagagtatttgggacgcattaatcataaaataggttcggctgaagaatttgcttatgatataattgaacgtattggagtgcagaagtatcggaatacggttaagtcgatggagtacctgacattggaggagcttcgtactatttgtgcacaggttggaaatatgagattagtagaacattgatataacatcggatttaagatttaaactaacgaaatgaatataaaacaattgatggtaactttcttcattgcactattggcaggaggagagattggagctcgtgtgctgacggataaattcgtttattcacaaggggagaaggttgtgtttacttttgatgggaagtcagaaggtaaaacgattatactgaaatatctctccaagaaaggagaaccggttcttgcggagattggtggagaaccatttgtttgggaagttccttcagaatttacgcctgcagccgtaggtgtttatcaaaaagaggagggacagttgacatattcttcttattttagggtggtaattcccggaatgttgactacctatcagatcgctaaagaggaatataaaggtttgaatgtgtttatgctcgatggtgggatgagtgcggaatatgctgtccaaaaatctttagctaatctgacggcaggtgtgagccatacatggcagattggtccgggaggaggtcccaaaccggtatgggggacacctgatttccttcaacaatccgttcagcatacagtagatttatataatgagtatttgggtaagtcgaagaaacttaaaactgtgataatagctacgggagtaccgacggtaccttatctttctgcagctatggaggctcctgtattgccattacattttttggtttctgtcaattctaccaaagaagtttcttccatattagaatattcctcgcaagctggagtaccctgttatgcgacattgggatatgatgcttccatggatgatgtcggagttgcctggataaaattattggctttgcctgatgaatatcggaagtttataatagaacatgaagtagaaaatgtaattatcgcaggcataggggaaaacgtgaaaagtgaatcttattgtcggaaacttagtaaaaccggagtggatggtcaggagtatgcagacggctctctttatattttatatacccaatccggttcagagcatgacattaaaacaatatcaagaaatgtcgtggactataatacgttatctcttgaaaaaggtaaggacttggccgattgggagagcggtgttgtcaacaggcagattgataatatatcaaaaggtatttgtgaacatactccggcacaagtttattctttgattgctactcatgatatgatggatatgtataatctcggtgcaaatatgggtatgtattttatgtataagaatcgggagcaaacaaaggtttccgtacaggggacttatttaaatgaatatttaatatcacaacctttgtatgagttgactcaaggatatattccattattgttttggcagtttgtccctcctgtatcaacgatcgacaggataaaacgtgatatacagaaagtggtggatgtttatgaaaaaggtgttctcctagagaataaaaccgtacatgtgaatgcacgtatcgggaaagaagagttggtgcaggaactaaagaaaaggggatttcggtttgttactaagcgcaaagataatgtggaagaattgtggaacctatccgatggaataaattctccttgtgaagaggttgtacagaatatagtggaacagattggggtaaaacaatatcagactcaatgtaagaatgcattgtatttaaatatgggtgatcttaaactagtaacgaataatattccgggacttgtctttcattcttttaagaaaaagtagcaagatgtttattggttacagtagtaacacctgctgaactgaataagttagcaagcaaataagttaaaattgtatggattagcagagggttatcaaaaaactctctgcttttctgcttgacttctgttgcgaaatgattacttttgcgcacgttatcaattcacaactgaaactatgagtaaaaaaagccttcttattgcggccgtggctatcttggtgatagctattattggtattacttatttattgtttaccgaaaaaaaagctaatcgggagttagtgcaggaattccaattggataaggaagatctggaaaacgaatatagtcgttttgtgcaagaatatgatgaattgaagtttaaggttactaatgactcattaggagtattgttagaacaggaacagttaaagacccaacgtctattagaagaacttcgtactgtgaagagttcgaatgcaacagagattcgtcgtttaaagaaagaattggctaccttacgtaaagtaatggttggttatattaatcagattgattcactaaataaactggctgcacagcagaaacaggtcattgcagaagtaacacaaaaatataatcaggcttcacaacaaatcagtaacctttccgaagaaaagaaaaatctggataagaaggtgacgttagccgcacaactcgatgcaactaatattcgtatcgaaccacgcaataaacgcggtaaagtggcgaagaaagtgaaagacgtggtgaaattggctatcagtttcacaatcgtgaagaatataactgctgaaaacggtgaacgtaccatctatatacgtattaccaaacccgataatgatgtactgaccaagagtgcatccaatactttcccttatgaaaaccgtacattggtttattcaattaagaagtatattgagtataacggagaagaacagaatatcaatgtgttttgggatgtagaagagtttctatatgccggaaattaccgggtagatatttttgaaggcgggaacctgattggttcgcagtcgtttacattaaattaatatcggggtattatttttctctaccgatattttaattttcttctatattaactaacccgatggtctgtttttaatatttcttcgggtaacagctgttcttttatggatgaactggggaaagaactgcataaataattgcaataatatacagaaaatagggtgaatgtagcatgaatttgcatacaatatgcggctttttaatcgtagaagccttcgttggattaaaatcaacgagatgtccctcaccgaggaaggataagttcttcggtgagggacaactcttttctcggtgaggaactcatatgggaatgattggaagcagtttttctctctagtttgtatgcgaataaagataaggagaaattgataaaatgaaggactgttgtctataaaagaatgatttgtaaatgcaatcagtataattttaatcttattgagtaaatataaggggaaatcatgttaatctaatttctgaagatagtaaatcccggccttttttctctttagttggaatctatgcccaatttgttgcattcccaacaacttgaatgtccctttttttagaagttctatttttaagtaccgtatagttgaatcgggtgatgaggaataacggttgcataatgtgaactgcttaccgtcttccgtcagctccccacatcattttgctgcggagtgtatcgaaaaaaatgtgattaaaacgtttcactacctttatgctgtaatctgcccgacggatggttagttgagtcgtttctttgcaagtctcgctcctcccgtcgatggcgacgaggaagttgtgacttctgctttctacatctaatgtaatctcccagtcatcccgaataacgatagggcggacgttgagactatgtggagccaccggagtgatggcaatagtgttggaatgagggacgatgatcgggcctcctacactcaaagagtaggctgtggaacctgttggagtggcaattactaacccgtcagcttgataagtattcagatacgcgccattaatagctgtccggatactaatcattgaggagctgtctcgtttgagaatagctatttcgttgagggcataaggagaatcttggagatgtttgtcgttgcagatcaactgaagtacgctccgttcctccacactatatctgccgttttggatttcatcaaatgtttcctccatttcctccggcgaaatatctgccagaaatcctaaacgtcctgtgttaattcccaaaataggaatcccttttcttcctacgcggcgggcagctttcagaaatgttccgtcgcctccgatgctgattaccatatcggcagtaaaatcatcaccatcaaataattgatctgctttaatatccatattttcagaaactaggaattgataaaattccctgcacataccaatctctgctccctgtttctttaaaagtttaaacaaggtgacagcatgagaagactttttagcctgataagtatttccgaaaatggcgaatttcataagcaatatcattagttcaggatgcaaatttggcattttttcttggatttctactttaaataaccaaaaaagaacccataatgcgtttcgtattattaggcaactaataataatatttgtatttttgcggcaaatataacgtagaactatgactaaattaagtgtaaacataaacaagattgctacgctaaggaatgctcgcggaggaaatgttcccgatgtagtaaaggtagcgcttgattgtgaatcttttggtgcagacggtatcactgttcatcctcgtcccgatgaacgccacattcgtcattcagatgtatatgatttgcgccctttgttgcgcacggaatttaatatcgaaggttatcccgctccggaatttattgatctggtgttgaaagtcaaacctcatcaagtaactttggttcccgacgatccttcacagattacttctaattccggttgggacaccaaagcaaatctggaattcctgactgaagtgctcgatcagtttaacagcgccggtattcgtacttccgtttttgtggcagccgatcctgaaatggtggaatatgcggcaaaagcgggagcggatcgtgtcgaactgtataccgaaccatacgcaacgaactatccgaagaatccggaagctgccatcgctccttttatcgaagccgcaaagactgcccgtaaactgggtatcggattgaacgccggacacgacttgagtctggttaatttaaattatttctataaaaacattccttgggtggatgaagtctccatcggacatgcgttgattagcgatgcgttgtatctgggactcgaacgtaccattcaggaatataaaaactgtctacgctcatgaatgcaatgatcttgttagcccaaggggctatgaatatggccgactcgctggctactgccaaccccgtattgacggaggtgaatgctcctgaaatgaacatgcttgatatggctatcaagggtggatggattatgattgtgctgggtgtattgtcggttgtctgtttctatatcctgtttgaacgtaactacatgattcgtaaggcaggaaaagaggacccgatgtttatggagcggattaaagactatattcatagcggtgagatcaaagcggctattaactattgccgtacgataaacaccccttcggcacgtatgatagaaaaagggatcagccgtttaggacgtcctattaacgatgtacaggtagctattgagaatgtaggtaatattgaagtggcaaagctggaaaaaggattgactgtaatggcaactatttccggaggtgctccgatgctcggattcctcggtacggtgaccggtatggtacgtgcattctacgaaatggcgaatgccggaagcggaaacattgatatcactttgctttctggtggtatctatgaagctatgattactacggtcggtggtctgattgtcggtatcattgctatgtttgcctacaattatctggtgatgctggtagaccgtgtggtaaataaaatggagtctcgtacaatggagttcatggacttgttgaacgagccggcaaaataataggctgatgggattaaaaagaagaaatagagtatcgcccaattttagcatggcttccatgacggacgtcatcttcctgttgctgatattctttatgataacctctacggtggtgtcgcccaatgctatcaaagtcctgttgccgcaaggcaagcagcagacttcgaccaaaccgctgacaagagtggttatcgataaagacttgaatttctatgccgctttcggcaatgaaaaagagcagccggtggcgctgaacgatctgacttcattcttgcagagttgcgcagagaaggagccggaaatgtacgtggcattgtatgcagatgaatcggtaccttaccgtgagatcgtaagggtattgaacattgcaaacgagaatcattttaagatggtgttggctacacgcccgcctgaaaataaataagaaacaatggacagaagaaaaaagggtgaatacataggagcgctgggtgcactgttggtgcatgtggcagtgattgctcttttgattctggtgagctttactgtccctcaaccggatgaagatgcaggcggagtgcctgtaatgatgggaaatgtagacgcagcgagtggcttcgatgatccctctctggtagacgtggatatcatggatgaagatgcggcagcacccgcggaaacagcaccggaacttccttcggaacaggatttattgacgcagactgaagaggaaacagtaactctgaaacctaagacggaagaaccgaaaaaagaaacggtgaaacctaaagaggtggtcaagccgaaagaaccggtgaagaagccggagaaaacggaagccgaaaaagctgcggaagcgaaacggctggcagaagaaaaagcggaacgtgaacgtaaggctgccgaagaagctgccagaaagagggtgtccggtgcgtttggaaagggagcgcaaatgacaggaaataaaggaacagcggctagtggtacgggaaccgaaggtagcaaggagggaaactcttctaccggagcgaagaccggaaccggaggttatggaacatttgaccttggcggacgttctttaggtacgggcagtttgccgaagcctgtatataatgtgcaggaagaaggacgtgtagtggtgaatatcaccgtgaatcctgcagggcaagtgatatcgaccagtattagccctcaaacgaatacggtaaattccactttgcgtaaggcagcggaggacgcagcgaagaaagcccgttttaatacgatagatggggtgaataaccagacagggacaatcacctattattttaacttgagatagtatcattaaccaaatatataaaggattatgggaactgtatacgctttttttgcagatggttttgaagaaattgaagcctttactgctattgacacgttgagacgtgccggacttaatgtagaaatcgtatccgttacaccggatgaaattgtagtgggagcacatgacgtatccgtcctttgcgatatcaacttcgagaattgcgatttcttcgatgctgaactgttgttgttaccgggaggaatgccgggagctgccacacttgacaagcacgaagggttgcgtaaattgattcttgattttgccgcaaaaggtaaacctattgcggccatttgtgctgctccgatggtattgggtaaactgggactgctgaaaggaaagaaagctacctgttatccgagttttgaacaatatctggatggtgcagaatgtgtaaatgaacccgtcgtacgtgatggaaacatcattaccggtatgggaccgggtgctgccatggaatttgctttgacaatcgttgacctgttggtaggtaaagaaaaagtagacgaactggtagaagcgatgtgtgttaaacgctaaaccgtccatgaagaaatatgtaatcattgtcgccggtggaaagggcttgcgaatgggaagtgacctcccgaaacaattccttcccatgggtgataaacctgtgttgatgcataccctgaaagtattcaggagatatgacgaaacacttcaaatcatagtagtgcttccacgggaacagcaggacttttggaagcaactttgccaaaaacacagctttgcggtggaacatacccttgccgatggaggcgaaacacgttttcactctgtaaagaacggtctggcactggtgcaggagccgggactggtaggggtgcatgatggagtacgtccgtttgtgtcggtagaagtgattcgccgttgttatgacttggcaaaagtgcagaaagcagtgattcctgtggtggatgtggtagagacacttcgccatctgacagatgccggaagtgaaacggtcagccggaatgattacaagctggtgcaaacaccgcaggttttcgatgtagagttgttgaaacaagcctatgcacaagaatttactcccttctttacagatgacgcttccgttgtcgaagcaatgggaatacctgtgtatctggcggaaggtaaccgtgaaaatataaaaataacgactcctttcgatttaaaagtagggagtgctcttttataaatgttcgatttagccacacgcgacataaaatttatctccggtgtaggccctcaaaaagccgctgtattaaataaggagttggaaatctactccttgcacgatttaatttattatttcccttataaatatattgaccggagccgcatctattacattcacgaaatagatggcaatatgccgtatatccagttgaaaggagaaattctcggtttcgaaaccattggcgaaggacgtcaacgtcgtttgacggcgcacttttcggatggtacgggagtcgtggatttggtgtggtttcaaggcattaagtatatcttaggtaagtataaactgcacgaggaatatatcatcttcggcaaaccgactgttttcaacggacgtatcaatgtggcgcatcccgatgtagacaagccggaagatttgaaactttcttcggtgggattgcaaccttattataatacgacagagaagatgaagcgcagtttcctcaactctcacgcgattgagaagatgatggcaacggtgattcagcaaatacaggagcctctgcctgaaacactttcttccaaattgctggcggaatatcatctgatgcctttgacggaagctctccggaatatccactttccgaccaatcccgatgtgcttcgcagggcgcaatatcgccttaagttcgaagaactgttttatgttcaactgaatatcctccgctatgccaaagatagacaaaaaagatatcgtggatatatctttgagaaagtgggagatgtgttcaatacattttatacaaagaatcttccttttcaactgacaggtgcacagaagcgggtattgaaggaaatacggaacgatgtcggcagtggcaggcagatgaaccgcctcttgcagggagatgtaggaagcgggaaaacactggttgctttgatgagtatgttgttggcgttggataacggttatcaggcttgcatgatggcacccaccgaaatcttggcgaaccagcattatgaaacgatcaaagaactgctttttggcatggacattcgtgttgagctactgacaggttctattaaaggaaaaaggagagaagcaattctggccggattgctgacaggagatgtgcagatattaataggaacacatgccgttattgaagatactgtcaatttctcttctttaggcttcgttgtgattgacgaacaacatcgttttggcgtggcgcaacgtgcccgtctttggagtaagaatgttcaacctccgcatgtgcttgtaatgactgccactcccattccccgtacgttggcgatgactttgtacggtgacttggacgtgtctgttatcgatgaacttccacccggaagaaaaccgattactaccatccatcaattcgacaatcgccgggaaagtatgtaccgttcggtgcacaaacaaattgaagaaggacgtcaggtctacattgtctatccgctgattaaagaaagcgaaaagattgatttgaagaaccttgaagaaggatatcaacatgttctggaagagtttccgaaatgtacggtttgtaaagtgcatggcaaaatgaaaccagccgagaaggatgagcaaatgcagctttttgtttcgggcaaagcgcagatcatggtggctactaccgtcattgaagtcggagtgaacgtcccgaatgcttcggtgatgattattgaaaatgcagaacgtttcgggctttcgcagttgcatcagttgcgtggccgggtaggacgtggagcggaacagtcttattgtattctggtgacgaattataagttgacggaggacacccggaaacgattggaaatcatggtacgcactaatgatggtttcgaaatagccgaggccgatttgaaattgcgtggccccggtgatcttgaaggtacgcagcaaagcggcatcgctttcgatttgaagattgcggatattgtacgcgacgggcaactgttgcaatacgttcgtgccatagctgaaagtattgtggaacaagaccctgcggcacagaatcccgagaatgaaatcttgtggcggcaacttaaagccttgcggaaaacgaatgttaactgggctgccataagttgaaaaacggttaaacatgcagtttatttgcgtaaatgtgttgcaaaacatattttgtccctattctccctatttataggagtttaacggctcaattgttccctctttttgtactaagcatctgaaaaatagttaataactctcttgccttttcataggaaaatactacctttgggggaatttttttagtaaatgtattgtttaaccatttgcaaagtcgagtattatgcttgaaaaaacgctggtcattttaaaaccatgtacccttcaacggggattggttggtgagattactcatctctttgaacgtaaaggattacggttggccggcatgaagatgatgcaactgactgatgaattgttaagcgaacattatgcccaccttagcggcaaacctttctttcagcgtgtgaaagattcgatgatggcaactcctgtcattgtttgttgtttcgaaggtgtggatgctattcaaacagtccgtacgttggcgggaccgactaatggacgtttagctgctccaggcaccattcgcggggattacagtatgagctttcaagagaatatcgttcatacatccgattctccggagactgcagctattgaattaacgagattttttaaaccggaagaaatattcgattacaagcaggctacatttgattacctgtatgcaaacgacgaatattaattgaattgacaaagaaggaatgaattttagcattattaaaacaggattggtcgctgttgcggctatggtcagtctgagctctttctcgcaagacttgattgcccgccaagcaccgatagacaagaaattaaaatcagtagactctttggccttgcagaagcaaatccgtgccgaacagtccgaatatcccgccctaagtctttatccaaactggaacaaccagtatgtgcatgcttacggaaatgctattatccctgatacgtatacaatcgacctgacaggtttccacatgccaactccaagtacaaaaattacttcgcctttcggtcctcgttggagaagaatgcataatgggttggacttgaaagtgaacataggtgatactatcgtagctgcttttgacggtaaagtacgtatcgtaaaatatgagcgtagaggatatggaaaatatgttgttatccgtcatgataatggattggaaactgtgtatggccatttatcaaaacaattggttgaagaaaaccaattagtgaaagccggagaagtaatcggtttgggtggtaacaccggacgttctactggttcgcatcttcatttcgaaacccgcttcctggggattgcaattaatccgatttatatgttcgacttcccgaaacaagatatcgttgccgatacttatacgttccgcaaagcaaaaggcgtgaagcgtgctggttctcatgatactcaagtggctgacggtaccatccgttatcacaaggtgaagagtggcgatacattgtcccgcattgctaaattgcgtggcgtatcagtcagtacactttgcaaactgaaccgtatcaaaccgactactactttgcgtatcggacaggttttgcgttgttcataaaaaatatagcttataaaacagtaatacaatatctttagaagagggcactttaatataatttagagtgccctctttctgtttttacttaattattgttacctttgcgcactatttggaagaagatgaaagataccaagcaacaatttgaacatgtcatcgctttgtgccgtgacttattttccaagaagctgcacgattacggacctgcatggcgtatcctgcgtccggcttcggtgactgaccagatttttattaaagccaatcggattcgtagtattgaaaccaaaggagtaaccctgattgacgagggaatccgtgccgagtttattgcgattgtcaattatggcattgtcggacttatccagttggaactggggtatgccgagtctgccgacatcagcaatgaagaagcgatggctttgtacgataagtatgcaaaagaggcattagaactgatgcttgccaagaatcatgattatgatgaagcctggcggagcatgcgtgtcagctcttacacagacttgattctgatgaaaatctaccgtaccaagcagattgagagcttggccggcaatacattggtgtcagaaggtattgatgccaattatatggatatgattaattactctgttttcggactgattaagatagaatttgaaggataagaacttacatatcattcaggaggtagtggcgaatatgtgtcgctttcttttggcggcatcgttcatcttttccggatttgtaaaggcagttgatccgctgggtttccagtataagatacaggattatctgactgcattcggaatggcttcctggttcccttcattcttccctttattgggaggtatcgttttatctgccgttgagttttttataggtatctctttgttctttgcaacaagaagaacattggctacctcattggctttgatgctgatgattttcatgacgccactgaccttgtatcttgccatctttgatccggtttcggactgcggttgttttggtgatgcctgggtgttgacaaattgggaaacatttggaaagaatatcattctgctatttgcggcaataatggctttccgtcacaggaggatgctgattcgttttatcagtgtgaagatggaatggctggtttctctttatacactgttttttgtgtttactttatcgttctattgcttggaccgtttgcctgttttagactttcgtccttacaagatcggaaagaatatcctggaaggaatgacaatgcccgaaggagccaaaccaagcgtatatgaaagcatttttatcctggagaagaacggagagcagaaagaatttacgttggataactatccggatagtacctggacatttgtcgatacgcgtactatccttaaggaaaaaggatatgaaccggctattcacgatttctctatgatagatctgaatacgggggaagatataacaaacgatgtattgacagatataggatatactttcctgttggttgcccatcgcattgaagaggcggatgatagtaacattgatttgattaatgagatatatgactattcggtggagcatggctacaaattctattgcctcacttcttcaccggaggaacagatagaattgtggaaggacaagacaggagccgaatatcctttctgccaaatggatgatattactttgaagacgatggttcgttccaacccggggttgatgttgattaagaacggaacaattttgaataaatggagcgatgaggatataccggatgaatatgtgctgacggacaaactggaaaatctgccgttaggaaagcagaaggtgagcagtgacactcatacggtaggatatgtattcttatggtttgttattccattgttgttagtgcttggggtggatgttttggtcgttcgccgcagagaacggaaaaacgcgaagcggaagcaacaagaggaagagatgaaaagcaaagaattaaaaacggagaatccgaaaatagaagaacaagaataaaaaaaataaatgataacgagcggcctctgtaacgaacgctaattccgatcgttcaattgtcaatcgtgaaatcgtaaatttattaaccctttaaaataaaaaacaaaatgagaaagaacattgttgcaggaaactggaaaatgaacaaaacccttcaagagggtatcgctttggctaaagaattgaacgaagcattggctaacgaaaagcctaactgtgatgtaatcatctgtactccgtttatccacctggcttctgttactccgttggtagacgctgcaaagatcggtgtaggtgctgaaaactgtgcagacaaagcttcaggtgcatatacaggtgaagtttcagctgaaatggttgcttctacaggtgcaaaatatgtaattctgggacactctgaacgtcgtgcatactacggtgaaacagttgctatcctggaagaaaaagtaaaattggctttggctaacggtctgactccgattttctgtatcggtgaagtgttggaagaacgcgaagctaacaagcagaacgaagtggtagctgcacagatggaatctgtattctctctgtctgctgaagacttctctaagattgtattggcttacgaaccggtttgggctatcggtacaggtaaaactgcttctcctgaacaagcacaggaaatccatgctttcatccgttctatcgtagctaacaagtatggtaaagaaatcgcagacaatacttctatcctttacggtggtagttgcaaaccttctaacgctaaagaactgttcgctaacccggacgttgatggtggtttgattggtggtgctgctttgaaagtatctgatttcaaaggtatcattgatgccttcaattaaatgatagttgataaatgatagttgatagttgctatgtactatagcctgctatcgactatcgtttatcttttcaactatcattttccgactgtcattctctaactgtcatttatcatttatcaacaatcaactgtttaataatgaaagttttacttaccctattgtttgttttgacagctacttttgcgcaagcgcaaagtattatcaagagtttggaacgtaacattccggggcaaggaaaggtgactatccatcaagatccccgcatcgaggctctgataggtatggaacgtcctgcaacaggtgaacagaaagtaataaagacttccggattcagaatccaggcgtatgccggtaacaatactcgtcaggcgaagaatgatgcttatcatgtagcatcgcgtgtgaaagagtattttcctgaattgacggtatatacttcgttcaatccgcctcgttggctttgtcgtgtaggtgatttccgtagcattgaagaagcggacgcaatgatgcgtcggttgaaagctaccggtgtgtttaaagaggtttctattgtaagagaccagatcaatattcctttataattgtatcatgttagaaaaagaagaaattgtttctccgaatctggaggagttgaagagtcattatcgtagtattataactttgttgggtgaagatgccgaaagggaagggttattgaaaactccggaacgggtggctaaggcgatgttaagcttgacgaaagggtatcacatggaccctcacgaagtgcttcgctccgctaaattccaggaagaatatagccagatggtgattgtgaaagatatcgatttcttctctctttgtgaacatcacatgttgccgttctacggaaaggcgcacgtggcttatattcctaatggctatatcacagggttgagtaagattgcccgtgtagtcgatatattctctcatcgtctgcaagtgcaggaacgcatgacactgcaaatcaaagagtgcattcaggaaacgctgaatccactgggagtaatggtggtggtggaagccaaacacatgtgtatgcagatgcgtggtgtagaaaaacaaaactctattactactacttctgactttaccggagctttcaatcaggcaaagactcgtgaagagtttatgaatctgattcaacacggaagagtataatccgttttctgcttactaaacaaataagcttatcgtaaaacgacgcgatctcccaaccgctttgccatgatgctttgtacggttctcaactcattatagcgttgcataagtgagtcgcatttctcattatcatgggcaagagcaggatcttggagggcataaagcatgtgcttcaattcctctgttacgattgcatacttgaagttaatcattaacatcggaaccatttcatagagccgctcttcatccgtcacaatcttttgggacttggagtgatatttactaagctgataacgcacattaatcaagtctacactcaatttactgattaccggatcaggatgtgccaggaaataacgttcggcaatgaagttggaatcgtgcatgtgtgcagcagcttccgataacatttggcggtgcagcggattatggaaggctaactcatcctctttcagatcattaaccacatattctatgacggttaccggaatttcgtttccttcttcatcggtcaggttacacatgattttctctccataacgaactaccgcctgtaatatcagtcgctcgaatttgtagaattcctgcccttcctttccttcctgcggaataaaggaagcataactgtcttcctgcagagcaggaggaacatctgtatatccgccatccacttcaggaggtaacggaatatctccattaggtattggaacatcttcaggaggtgtgctgccctgtgacatcatagccgttctttcagccatccggcgttcccgttccgtttgttcagctcgcttctctgcttgagtttcccgtcttttggcaacttctgatactagcagcttatcttctacatgaagtagctgcgcgcattctttgatatagacgtctctgacaattgcttcagggatgacagaaatactttgcaccagattaccaatcagttccgcacgcttgatgggatcttttcctgcatcctccagtagcaagttcgttttgaagcggataaagtccgtttcatgttccgagataaaagtctgaaattccgttgagttgtgcttgcgggcaaaagagtccgggtcgtccccatcgggaagaagacagactttgatattcataccttcctccaataacatgtcaattccccggatagaagccttgatacctgctgcgtcgccgtcgtaaagcacagtcatgttgttggtgaaccggtgaatcatacggatttgtcccggtgtaagggctgttcccgaggaagcaaccacattctctatgccggattgatgcatggagattacgtccgtgtagccttcaaccaaaaagcaacggtcttgttttacaatagcctgtttggcaaaatatataccgtataactcgttacttttgtggtaaatttccgattcgggcgaattgacgtatttgactttaacccctttcgttgcactggcaagtacacgtccgccaaaagccaccactttgccggaaagcgtatgtacagggaaaataacacgtccccaaaaacgatcccgtaaccggtggtcgtccgtttcgtagcaaagtcctgtttttaccaagtactctttcttatatcctttttggattgcttctttggcgaatgcatcgtgggcttcagtgcagtaacctaattggaatttctcaatgatgtcgtcgcgaaagccacggttgcggaaataggccataccgatgctacgcccgtctacatgattttttagtatgttctggaaatagtcgcgtgcaaagttattaacgataaacagactttcgcgttcgctttgcacaaacttctcttcatcgcttaattcccgctccttgatttcaatattatatttcttggcaaggtacttcaatgcttccggataagacatctgctcgtgttccataatgaaatgcacggcatttccaccttttccacaagcaaaacatttgcataatcctttggcgggagagacataaaaagaaggggttttatcactgtggaacggacataaaccgacataattgacaccacgtttgcgcagggtgacaaaatccgaaacgacatccataatttgtgccgcgtccaatatccggtctatggtaatttgatctatcattctttctcctgtgaatccgtttttgcggatacaaaggtacacataaaaaaatcccctgcaaagaacttttttgcaggggatcgttaaatcttggcaccggtattgattatttaatcttttcccggatcttcgtcagatactttttcataccttccgcatccttgttttcgatgatttcgagaaggtttttcaactctgtccggatattagtcacttgtcccggagtgcgtgggttgaacagtatttcctgaagcaggtaatcatcttcgcttagcagccctttggcgattgccatgtgctttttgaacgtagttcccggggcttcctgatgtttcattacggcagcaaatacgaacgtcgatacgaacggaatagaaagcgagtaggctactgtttcgtcgtgctcatcaaatgtatattcgaagatgttcaaccgtaatgtctggtagaggtctttgaagaatatttttcccaggtggtcgccttcactgatgatgatggcattttcgctgcttagattgctaagacttgcgaaagtcgggccaaacatagggtgactggaaacgtagcggaaaccactttcttcatagaacttcttcaatcctgtttttacagaggcaatgtcactaatgatacagtctttcggtaatacaggcagtattttgcgaaaggcatccaacgtgtacttcactgtaacagcattaataaccagttccggttcaaattccttaatctcctccaatgtagtgaaacgatacgtgttatagacgaaacgcaactggtgcgggttgacgtcgaacacggccgtctcgtgttgaaagctcaaaatatcagtaaagaaggagcccattttaccagctccaaggattaatattctcataatgtttattatttagtagtcaagtagtaagtagtagatactacttgactactctaactacttattaataatttccatctgttgacgaactgattcttcgtggatggcttcgaaaatcttcttcataaactcgctgtccataccgcattgttcgccctgcgcgccacgtttttccagaatctcattgtaacgtccggcttgaaggactgtgattccgtgctcttttttgtaagtaccgatttcacgtgccacacgcattctttttgctaattcctgaatgatattgtcgtcacattcgtcaatctgtttacggagctgtgccagactttcggtagactgtgtttccgtacggattaccaacagattgaggatatagtcgagtacgtccggagtaacttgttgagaagcatcgctccatgcgcaatccgggttgcagtggctttctacaatcagaccgtcgaaattcaagtccatagcctgttggcaaagcggtgctaccaactcacgttttccaccgatatggctcggatcacagaaaatcggaagattagggatacggcggcgtagttcgataggaatatgccattggggaagatttcgatagatctttttgtcataactgctgaaacctcggtggatagcacccagacgcttcaaaccagcgttgttgatacgttccagtgctccgatccataattcgagatccgggttcaccgggttcttaaccaatacagggatatcaacccctttcagtgcgtcagcgatttcctgtacggcgaaaggattggcagtggtgcgtgcacctacccaaagaatatcgattcccgctttcagacattcgtaaacgtgtttggctgttgctacctctgtagaaacatacattccagtttctttcttcacctctttcaaccaggcaagaccttctacaccgataccttcgaaacctcccggtttggtacgcggcttccagattccggcacgatatattttttgtcctttagcagccagttgtttggctgtatccattacttgttcttctgtttctgcgctacacgggccggcaatgacaatcggtcttttagcttcaacgcccggtaataaaattgattcgagttccatattcttatttgtttttattcttttaataacttgttttcattgaaattgttctgtctcattctactgtcgttctctctttgggagaggttagattcttttaattctttccagagcttctgccagcttattgtccttgcaacaaagtgagatacgaatataccttgctccgttactgccgaagataaatcccggagtgataaacactcttgcttcatgcagcaccttttctgtcagttcctctacatctttgcaggaagcgggaatctttccccaaaggaacattcctacttgtttttcgtcgtaggtgcatcccaatgttttcataatctcaccggcgaagtgacgacggttgcggtaattctcgttattgccttcataccagtccgcttcggcctcaagagcagttgctgcagccagttgcatagcacggaacataccgctgtcgatattacttttcactttcaatatccattgtacgaattccgcgtttgacgccagcatgccgatacgccagccgggcatattgtggctcttgctcatagaattgaactcgatgcaacagtctttggctcccggtacacttaggatactgataggtttttcgttcagaatgaagctgtatggattatcattcacaattacgatattcttgcgacgggcaaagtcaacgagacgttcatagatttccggagttgcattggctcccgtcggcatgttgggatagttggtccacatcagttttacacggctaagatccattttttccagtgcctcgaagtcaggcatccagccatcctcttctttcaggtcgtagttgataacttccgctccgagtattttactcaaagaagtataggtagggtatcccggattcgggactagcacctgctcacccggattgacgaatgccagcgtaacatggagaattccttctttagagccgattaaaggctgtatctccgtattcggattcagttccactccataccagcgttgataccaggcagcgaagcctttgcgcagttcagggatacctacatacggttggtaaccgtgtccgttgggatcatgagcattgttgcacaatgtttcgatggtttcccttgagggaggcatatcggggcttccgataccgaggctgataacatcctttccctctgcattcatctgtgctacctcttttagcttctttgagaagtagtattcgcttacacttgccaatctgtcggcaggagcgattttatacgtttgactttccttctgcatattcgcctaataatttaagttctttggttaatggagtgattgcagcaatagactgcttgtatcttagataatcgttgaaagctacatctacgtaaaactggtattcccattcccgtccgatgataggcaacgattgaatttttgtcagattgatattatagaacgatagaatggataaaacctgtgacaggctgccttccgtgtgtggaagagtgaatacgatacttgccttgttggttgcattggcatgatgttggcggagttcgtctacttgccagggatcggcaacaaccagaaaacgggtgaagttgtgcttgttcgtttcaataccttcctgaaggactttcatgccgtaacgttcagctgctgctttggagcagatggcagcgtgtcctttcagattttcattcttgatgatttctgcgctgcgggccgtgtcttcaccttccaccactttcaactgcggatgttgattcagaaattcgcgacactgcatcagggcgatagggtgggagttgacttctgtcagatcttcccagttctcatcggggagacagacaaaactgtgcgagatgcgcagtttgtattcaccgataatctgtgtgccgctttgtctcaacaattcattgttgtgcaacaaacttcccgcaatcgtattctcgatggctagcattccgataacctggctgtctttccgtatcgaagtaaacacatcttcgaagttggcacaacagattaactctatttcttctccctcgaagtacttgtgtgcggcgatatcatgatatgagccgagtgttccttgaattgctatctttttcattgttctaaatatattatataaaaaaatcccgcgtccatattggagcgggattcatatgattgatttctctattcagtccttaagcatcactgtcacttgatacatacaaactcccgctctactttgttgctaaagtaaaagtaaaaaaagaagtaatatgcataagtaaatgatttcattagaatctatcttttttgctttggtttttaattctggggcaaaagtaataattttctgttagatgcaaacaaaaaacgatactttttttgttttcttgcctaaaatagatgaaaaggatacttaaaagatgccgggaagtgcttcaggctttggtcccaggttcttgaattctccgttcagaccagcttcctctttcggattcaattccagagatttcttcatgtcctctaccgaaccgtccttatcaccattcagtaatttagcacgtccgcgttctttgtaggcttccgcaaagttcggattcagctcgatggcttcatcaaacaggccgatggcttccgtcagttttttctggttgatataaagttgccctaaataaaggtatgcctgttcgttgaacgggtttatttccgtcaccagtttgtaatcttcttctgcctcttcgtccttgccgtctgcttctttcacttttccgcgcaggagcatggctgtctcttcttccggattctgggcgagcacagcatctatatcttccatcatatctttatactgtttcaggttcatcaaagcttccgcacgtaataggcgagcttcaatgaaatcatctttcaaagtgattgctttggtgagatgggcaatagtcatcaggtcgtcatcctgtcccttacgggctttccctaatagataatgagccacggcatttccttcttcgatggcaatcgctttattggcagcttcttccatagcctgataatcttcctggatgaagcatacattggccagtgtcaggaaagtgcttgtgacgtcaggttccatagcagccatcttttccaatagctcgcgggcctttgccgtttcccccatctggatatagagttggctaagatagcccattgtttcaaactcttccttgatggcaagagcttcaataaaacattttactgcataatctggacgtcccatgcgttgcgcacgtaaaccgtcgtatttgaaaatctcgaaatttttctgatcgtttttctgtttttcactttccggagtttccgacttaccggagaagaaagatttaaaaaagttcggcatggtgtgttatttttgagttactttgcaaaggtagtaacttattttgaaatatgtatcattccatcctgcatcttccattcaccttcctccaataaatattggatgacttcgctgatgctctctttttccgcttctatcttatcggctatttctactggtgtcagcggtttctgggtgagtaattctgatattttctttttcagttcctcgaaatcgaaagaattctcggtcagggcatcggttgcacggtgactaagacaaacatcgcattgtccgcagttgtgctcgttcttctctccgaagtaacggagcagcatccggctccggcacacattctccgaagtgacatactcttccatcgctttgatgcgggcttcataccgggctttgcgttcttcgtagacggaaggaggaatatgcacaaaacgaagttcctgccgttcgcgggtgtatataatataaggtgtctttttgtgcggaatgtaatccacgatacgacgtttggtaagcgtgaccagtatattataaatttgttcgcgggtcagtccggtacgtatggacagggttgcttcgctgatataggcatagtcggtgaatactccggtgtaagagcggagaatcgtctgtatcagtgcttcggcttccgttcccatttctcgcaatttgtatagttcgtcccggcgaatcgtgaaaagaatacgagaggcattatcctgttcgtccgtatattccagatagccggcttgagtcaatattttcagtgcactgtctaccggaaccgggaagtatttgaacttccggcaaaactcttccagattaaactcgcggacacattggaaaccgtcgcccattgccatctgatagtaatactgcaaatgttcgtagacattgagaatatactccttgtcggggaaagtatccacaacgcgcctgtgcagcgtcgttctgtccgttttggtgtataagattacagcatacgctttttcaccgtctcttcctgcacgaccggcctcctggaaataagcttcgagagagtcggggagatcgagatgcaatacgatacgcacgtcgggtttatcaatccccattccaaaggcgtttgtagctaccattacacgaacttctccgctttgccagcgtttttgccggaggtcttttacggcattatccagtccggcgtgatagaagtcggcggtaatatcttcgtttaccagtaactcggtgatttccttggtgcgccgtctgttgcgggcatagataatggcgctgccgggtatctttcgtaagatatgcaacagctcttgagttttgttatccgtttgccggacgatatacgccaggtttttccgttcgaagctcatgcggaaaacattctcttcacggaaatccaggcgagcttgaatatccttcactacttccggagtggcggtcgccgtaagtgccagtaccggaattcccggtagcaatgtccgtatttcggcaatttttaggtaagcaggacggaagtcatatccccattgtgagatacagtgactttcgtcgaccgtaatcatggagactttcatagatcgcagtttggtacggaatatgtccgtgtccagacgttccggagaaatatagaggaatttataattaccgaagatgcaattctcaagagcagtgagaatctcctgccgtgtcatgcctgaatagatggcaagcgccttgatgccgcgtttacgtaggttttgcacctgatctttcatcagggcgatgagaggagtaatgacaatgcaaatccctttctgggcgagagcaggcacttgaaaagtgatggacttaccgcctccggtcggcataagtcccagtgtatctttgccttcgccgatactggtgatgatctcctcctgcaagtcgcggaaggagtcatatccccaatattgctttaatatctcctgatacttattcaatcggctttatatcctcgatttgaagttgtacttcaccacgcttgtgcgtgttttcttcaatggtgtaacagatgtcgaacgagcgtttcgttttgatataacgtacgtgtgagctctgtccgaacgcgataccgttcattacattattcgatttattatcgaccagttcgagtttgatatgttcctgatcgcgtcccaccactttacttgttccgtaatcataaacatgatgagtgcagaaaataggtttcgtgttatcaggaccgaaaggattaaactttttcaggtcgctgaagaacttggatgaaatatccctgaaatctatttcagcatcaatctcgataacggcactggtttgttccggtaagatatgctgtgaaacgtattcttcgaatcgtttggtaaaggcattcacgttttccactttcatcgacagtccggcggcgtatgtatgtcccccgaagttttccagcaggtcgcggcaatgctcgattgctttatatacgtcaaagccggaaactgaacgtgcggagcctgttgccatatcatccgtccgggtcagtaccacggcagggcggtagtacacttctgtcagacgggaagctacgataccaatcactcctttgtgccattcttcgttgtagagcacgatggagcggcgatcggctaatccttccagattggcaacgatgttgtttgcctcttccgtcatactcttgtcgaggtctttccgggtttcgttgtattggttgatttgtccggctttctcaagcgctatcgagaaatctttttccgtcagcaggtctacggcttcttttccgttttgaatacgtcctgatgcattgatgcgcggtccgattttaaacacaatatcgctgacggtgatttccttttcagaaagtccgcatacgtcgataatagccttcataccaatgctcgggttactgttcagttgcttcagaccgtggtaggcgaggatacggttttcacccataatcggaacgatgtccgatgcaatactcacagctacaatatccagcaaaggaatcaggtggtggaactcgataccattactgatagcgaatgcctgcataaacttgaagccgactccacaaccggaaaggtgagtgtacggatacgtattgtccaggcgtttggcgttcagaatagctacggcaggcggaagcacatcatccggtacatgatgatcgcagatgatgaaatcaatccctttctctttggcataagtgatttcctctactgctttaattccacaatcgagtacaataatcagtcctacaccggtttctgcggcatagtccactccttttttagaaatgccatacccttcattgtatcggtcgggtatgtaataatcaaggttcgaatagaactgttgaataaacttgtagaccaatgctacggcagtagtaccgtctacgtcataatctccataaattagaatacgttctttctttcccatcgccctgttcagacgttctactgcaatatccatatccttcatcaggaacggatcatgcaggtcgggcaattgcgggcggaaaaacttcttggcatctgctgcctttgtaattccccgctgcaccaaaagttgtccaagtatcgggctaatccctagttcctgggccaatgtctggcttgtctctgcctgttcgggtgtaatgggtcgataattccatttgtgattcattttatatattgttttttctttttctgttctcaagggttgaaaaggcacttctttccaacaaggggtaaaagtacgaaaaaaagcggaagtgtatagtagataagacgaaaatatttcaaggctggcttttggaagataacttcttttagctatctttgcttcgttaacaaaagtctaaacaggtgagaaatacgctaaaatgagaagacaaaacggtgccataagctctaatatgacatttgatgatatctatattgagtattatcaacgttgtttcttgtttgctaaatcctatcttcacgatgagatgcagtcgaaagatatagcctctgaggcaatgataactttatggagtacgatgaagactgaagaggtgaaaaatatccgtgcttttttgatgactgtggtaaagaatcaggccttaaactacctgcgaaatgagcatctgcggatggaggccagggaaaacatcctggatgatgaactttacgaacttgatttccgtatctcttctcttgactcttccgatcctaaccaacttttctctgaagaaataatcgccattgttaatcatactttaaatgaattgccggaaaaaacaagaagggcatttatgatgagtcgatatgagaataaatcgatgaaagaaatcgctgaatcattaaatatgacagtgaaaggggtagactatcatattggcaaagcgttgcaagctttaaggaagaacctcaaagattacctttatactctactttttttctaatagaataccttaccgataaagttctccttcggcattgatgcatatcctcctcggcattgatgaacaaatgaaggacctcaaagcactttttttatttttcttctagtgaagtttgtaagtggcgtgtcttatatatgtaagccctcaaaaagcttatgtcttaaccccaaggaaaaagtatggatacgaaactattaaataaatatcttgcaggagatgctcttcccgaagaaaagagagaagtcgtgcgctggatgaaagaaagtgaagaacaccgtgaacaactgatgcaaatgcgtcatatttatgacgctactatctggaatggtaatttgcaagaaaaaaaggcggaaaataagaaaattatgatgcgttatctttgggcctctatgaagatagcggcagtcattgccatgattgcttttattattcataaggaatatcaagagtatcggtttgaacactctactgaaatgcagatgatgacggttcccgcagggcaaagggctagcctggttttggctgacgggacaattgtctggttgaactccaactctactttaaaatatccggctaccggatttcatgccaaagagaggaaagtgattttggaaggagaggggtattttgaagtggctcataacgagaaacatccttttattgttgagaccgagaaatatgatatcagagtattaggaactactttcaatgtctcggcatatcctaactccggtttatttgaagcttctttgatagaaggtaaagtcaccgtataccatcctgaaacgcaaaacgaaataatcttgaatccacatgaaaaggtggaagttagagacgggaaactttataaagagacctttacttcggatcatgatttcttgtggaggatgggtatttattcttttaaagatgaaccgttggaaactgtctttaagaaattagagcaatattatgaagtgaagatcattaataaaaacatagaaataacttctcatccgtgtaccggtaagttccgccagaaagaaggaatcgaacatgtgatgagagtattgcagaaatacatcaaatttaattatatacaggacgacgaaaagaatcagatcataatctattaaccctagtatttaatctaaaaaaacactgaaaatgagagcaagagaacctgcccgtttaaaacagaaatatcggtaagtgttgcagcacttaccgatatgtgagaagtcaataaaaaagactcgtcatctgttacaaatctttatgtattaacttaataactctaggcaaagatatgaaaaataatctttggtgtggacgtattgtccatagaaaaacacactgtactcaaattttaagaattatgaggttaactgtctttttcctgttattcattgtttttgagacatattccttgaatgtccgttctcaaaatcagaaagtaacgatgaataaaggtaccgcaacactatctgacattatcaggcagattgaaaaacaaacagactatttgtttatttacaatgagcatgagattgctttagacaaacgaatagcagtatctactcgggaaaccacggttgccgaaattcttaatagagttttgcaaggaacaggtttctcgtatacgatggaaggcaaccatattattctggtgaaaaatatggagaaaatgaaaaacgtaactcccggtcggaagataacaggaactgtgaaagatgatttgggagaggttattgtcggttgtaatgtagctgttaaaggtgagaaaataggagccatcaccgatatggatggaagatatactatcgaggttccggacaatagtatattggttttctcatttttaggttataagagcgttgaatctcccgtcaagaataattcggttgtcaatataaccatgcaagaagactccagatctttggaagaagtggtggttgtaggttatggaacacagaagaaagtcaatttgacaggtgccgtgtctgtggtagagggggatcaattggcagggcgttctgcttcgactatgtctcaattactgcaaggagcagttcctaacatgactgtctctttttcttccggtcgtgcaggagatggaggttcgtttaatatcagaggagtgaattccattagtggttctgccaaaccgttggtccttattgatggagtggagggagatgtgaatcgtgtcaatccgaatgatgtcgcctctgtttcggtcttaaaagatgcgtcgtctgcggcaatttatggagcacgtgccgcctatggagttattctggtaactacaaagacgggagaaaaaggcaaagtcactcttaattataacggacgatatagctttagtgatgtaactacgtcgacagattatgaaacccgtggatattatgcggccggtattagtgatatgtttttctctacctggcaagggacaccattgcttacatatacggaaaaggattatcatgagttgtggatcaggagaaatgataagacggaacaacccgaacggccctgggtagtaactgaaaacggacagtataaatactatgggaattttgattggtataattatttatatgaccataaacgtccgacgcatgaacataatgtaagcatttccggtggaagtgaacatttgaagttcaggctttccggaggatattataatcagaaaggagttcttaaaatacaaccggacaagtatgaacgctataacttcaaatcaaggctggaagccaaagtgactccatggttatccgtcagtaataatacctcttatttcaaatcgaattactcctatccgggacttggtggagtgaatacaatatttaagaatgcaagctatcgtgccttgcctatattagtgcctgtacatcctgatggtacactggtgtatgaaactaatatcatgaactatactttggcgggtaccaccgttgcattatctaataagaaacataataataaagatgagatagacgagtttatgaccacatttgaagtcgttataaatccggtaaaacatgttgaaatcatagggaattacacatattcgaaatatgacaagaaatgtaccaatagaagtgtagacatgcaatactccaaggtaccgggtgttacgattaccatgcccgagagtacaagcggagggaataaactgactgtgttgaatacaaaaaatctgtattatgcatataatgcttacggaacttatggtaacttgtttgccggctctcataatgtgaaactgacaggcggtatcaactatgagacaaaatcttatgaagatctgactgtgagtaaagatggactgttatctgatgaattgaatgactttaatttggctaagggagaaaatacagtagtcaccggaggaaagaataaatatgctttatttggtgtcttttatagggcaaactatgattataaaggaagatacctgtttgaggcgagcggaagatacgatggcagttcccggtttaaaaaaggccatcggtacggcttcttcccatcgttctccgccggatggcgcattagcgaagagcctttttatggagcattgaaaaatacagtagataacctaaagttacgactgtcttatggaactttgggcaatcagcaagttggttattatgattatctgcagcaaatagaaacaggaaaagttcttaattattcgtttggtgataaagaaaaagcctcgtatgcctatgaaaccgctcctaatgcttccgacttgacatgggaaaccgtagttactaaaaatattggtcttgatatcggtatcttcaataatagattgaatatttcggcagatgcttatataagggatacaaaagacatgctaatgcccggcaaagcattaccgtctgtctatggcgcaaaatctcctaatatgaatgctgctgacttaaggaccaaaggttgggaattggtcgttgcctggaatgaccgttttaatgtgatggacaaaccttttaactatggtgtttcgtttggaatcggggataatgtctccaagattacgaaatatgataaccctaataaagaaatcagttctccttatgtcggtcagagactgggggatatatgggggtatatggttgatggctattttgcgacagatgaagaggcagctaattatggagtagaccagagtgtcgtaaactatatcatcaacaatgccgttgtcgatagaggactgcatgctggagacatgaaatatctcgatcttgatggcaataataagatcgaacaaactgtcagtgctaatgatattaaggatcaacggattataggtaattctcttccgcgctatacgtacagtatcagacttaatgcagaatggaatggcattgacttttccgtgttctttcagggagtggggaaacaagactggtacccatccagtgatgcatttgccttttggggaccgtatagttcaccagcaccaagtttcattccaaaggattttttggcagacgtatggagcgtagacaatcctgatgcttatttcccccgccccagaggatatatcgcatggactgatggccgttccttgtcatcggttaataacagatacttgcaaagtcttgcctattgccgactgaaaaacctgactgtgggatatacgctacctgttaaatggttatcaaagatacatgtgcagaaagcccgtctctatttcagtggtgagaatctgctcacattagacaggctggatacggattatattgatccggaagcggctgctgccggaacaaattggaaaacaggtaagactaatgcactctcttatccgttctcaaagacctattcttttggtattgatattacattctgataataactaatatatctatatatgaaaaccaagtttagtatcatatttatgtggttgtttaccattctttttatatcgtgtgataaactggacctttatcctgaagacagtttgtctccaaccacctatttcaagaatgaaaacgaacttcaactgtatagtaatcagttttactataatatactgcctacggcagcagatatttataaagataatgcagatgtattgattgtttctccgttggatgatgaggtaactgggcaacggatcattccatcgacgggtggaggatggaattgggaggcattgagaagtcttaatttcttgttagagaattctcataattgtgaagatcaagatgtacgtaataagtacgatgcaatcacccgttttttcagggcttatttttactttaagaaagtacagcgatttggagatgtcccctggtatgataaagtactggattcgtctgatgctgaactgttgtataaacctcgggattccagagagtttgtgatgcagaaaatcattgaagatttggattttgctattactactttatccaaagataaagaactttacagagtcagtaaatgggctgcattggcattgaagtcaagagtttgtctgtttgaaggcactttccgcaagtatcatgggatagcagactacgaaaaatatttggatgcgtgcattactgcttccgatgactttatgaagaatagtggatatagtttgtataaaacaggcagtactccttatcagactcttttttcttccttgaatgccattcagcaggaaattgttttggctagagactataatgggacactgaatatccgccacgacgtgcaaggttttgaaaatacagcttcgaaaggcagacccggattatcgaaaaagattgtaaatatgtatttgaataagaacggttcccgttttacggacatgcaaggatatgccactaaggtattttttgatgaatgtcagaacagggatcctcgtttggcacagaccatccgtactcccggatatatacgtccgggagaaacgaaacagtcgggtcctaatttctcttcggcaatgactgggtatcatttaattaaatattcgggtgccaccaaatatgatgttggtgacacgtctgaaaatgattttcctattttcaggacggcggaggtttttttgaattatgtggaagccaaagcggaaaggggaacgttggaacagaatgatattgacaggacaattaaattaataagggatagggtaggaatgccgaacctgaatatgagtgacgctaatacaggacccgatccttatctgctgaatgtctatcctaatgtctctgaaacgaataaaggagtcatactggaaatccgtcgtgaaagagtcatagaattgttaatggaaggcttccgctattatgatttaatgcgttggaaagcggggagttgtatggatgatgagtttttgggaatgtatttccccggtccgggcaattatgacctgaatcatgacgggactattgatgtctgtttgtataaaggagcaaagcctggtggtgtcaatgcgcttgaatatctggagattggagttacggtagaactgacagaaggagaatccggaaatgtgatttgctataaagatgttcctcgccagtggaatgaagaacgggactatttatacccgattccaaggcaggaccgtattttgacaaatggagctctgacacagaatccgggatggaatgataatttaaacttttaatttgatcggtcatgaaagaatatagaataatgatattactagtttctacgctttttataatagctatcagctgctccagccaactggacaatgaagatttcagcgatatgataggaaagggacagaattatactcctcctcctatcccggttgaagaaccgacattgaaggacaaagatggctggaaaatagattctattgacggaaagagttttatatggtactcctataataaaggggctttcaatgcccaacaacaaataaatgtgcttgaaatcgacctgtcgagtcctgattacgaattggagtttgtttcggctcctcaactcgattctttgtcaagcgttgctctgaaacatgatgcggtagccggaattaatggtacgtatgaacttgaagcctctttcgtaaaagtcaatggctcaataatttcaccgatcactcttcccgaagggcatttaagatattggaaacatgaaggggccatagcttatgacggctataaggttgaaattggatatggaacaaaggaatcatattcctataattcaatgcctaacatattctcgggagcaccagtcttgatagatgattatcaaccagtaggtgaaacatttattggagatataaccggaatcaacctgaattccctggatggagaggattaccgaagacatcagggagtacgtcatccccgtaccgctgtggctttgactgaacagaataaacttttgttggtaacagtggacggtcgtgcggatttggcggcaggaatgactgccaaagagcttacctcctttataaaccagtattttaaaccacagcatgccttgaacgtagacggaggagggtctacaacgatgtatatacgcgacagtaatctttcagccacagatgtagtcaactatccgtgtgataataaaaagttcgatcattacggacaacgcagtgtcaggactttcatcttggtaaagaagcatagcaacgggcagttgtttgactctggtgacggttcggaggataatccttatattataaaaacggcgagacatatgcaggatatgcataaggtcaattattctaaaggaatggtttatttcagaatggaggccgatgtgaatatgtcagggattgattggcaggctttgaatgtgagtgagccttatgacagactcgtccattttgacggaaacgggcatgttataaaaggcttgaaatcgcaaggtaactatgccagcttgttcggggtgttatgtggagtctgcaagaatttgggaattgtggatgcagatattgtggcacaaaatggaggcggaatattagccggctatgtagggataaaaatcccgacttcggatgtacttaccggaagtgtagaaaattgttatacgagcggaaaggtatcgggatttgatataattggcggtatttccggtaatatcggtaaaccgagcggatctgtgtattcgtccattaagaattgttattctactgccacagttacagcgaagaatgaaacaggaaattcacgtgccgggggaatagtaggtattgtctgggctggtggtatattggagaattgctatgcggcaggtgaagttatttcaatgaattccggagcagcaggtatcggagcttattttgatactgcacctaaaagatgcgttgctttgaataaattagtggaaaacaagaaaaatggtgtaaatttggggcgtattgccgccttcatgggagcagctaatatgacggttgttgattgttgggcaacagacgatatgaagattttgaatgccggagtacctaaaaccgaattttccggtgaattagtcggtgtgaagcaaccccacgatggggaaactaagtcgaaggagttcttatcgaatatgcagaactaccttgatgcaggatggggaaactcatggtattacaaggtaaatgcgaaaggatatcctattctgttatggcaatataatcgggaagattataatacggatattactggtcattaagactaatatatattatacttaacacatttattcgttagtttatgaagaaaaacttgttaatcgtcgttatcctggctgtatgctccattgaaatggtaaaagggcagacagtagcggattcattggcaattgtatctgcttgttggaagatagaaaatcctcaaaaaggaattgtatataagtatgcttctatccctcaattatatcaaggtccccaatctatcagcctgatagaaattgatcctgttgcaggtttgaaagtcaatgttgccgtttcggataaaatgaaagaaacaagtaagattgcttctgaatataacgccattgcagccattaatggctcctattttgacatgaaacggggaaactcggtctgtttcctgaagacggatcgccaagttattgatacaacgctgcagagtgagtttaaacagcgtgtcacaggagccattagtgtgcgcaaaaggggaatgaaattaattccttggaacaaacagatagaaaagaattataaaggcaaagcaggtacgatactagcttccggtccgttaatgttgaaagacggacaggtttgtgattggaactcgtgtgaaccgaattttatccggacgaagcaccctcgtagtgctgttgctactactaaggatggaaaagtcctgttgataacggtagacgggcgttttcctgaacaagcaggaggagtgaatattccggaattggcacatctgatccgggttttaggaggtgaggatgcattaaatttggatggaggtggatctactactctttggttgtccggtgcatcggataatggagtcgttaattatccttgtgacaatgggcggtttgaccatgccggagaacggaaagttcctaatattctttatataacgcatcaataacgtttccattattcttcattgtatttaaggtctttcagtgcatagattaagacttttcagtgcagaaactagtgactttttatgcagtcgggtggttgtcctgttgtaacgggacaatgggcactttataaaaagacgaatgtcaccttatagggtgacatttatcattctataaggtgactagctatcctcaaaaggatgaaaattactaaagatacaaaattaattagtgaaaagcaatagtagggtaagaaatttatctgtattgcaaacaggcttagaattcaaatccgaatctagctcctactccatgtaactcccatgtatcattccaactgttatgataataatgccctccatagctgcaactataatctgttgtggcgtcataatcttggaagttatacatcaaagctaaattcaaggcctttttcccttttaaagagaaacgtactcctactcctattgaagcatacgctccttctatgtctcctacagcatatccggcttttacgtcggcgaacggagtcacttttttgttgatgaagttagctctgaagttagcatagatgggggctgcataaagaactgcatcggtatagtagttgaaagcaacgccaccacctacaaagaaataattgttgaattgataaccatgtgtggttgataattcaattttagaggcattgtagtcgctcacatcgccaatatatgcaaagtctacgaaacccttatagccttttaatgtatttcttgcggctttgcggtcgttggtatccttacgataatctcttgtgtaccgctcttcttttgtgattttagtcacatcactcatctgacagatgatgaggctgccatcacctgttttgatttttaaagagacattgggcacttgttcaatgattactcctttaataatgctgccattctttaaatacactacttctgtgtaattctgtgctgcgacatacgtactgatacttaataataaggtcagtactaatagtagttttctcatacttgtatttttattgtttatagtttcttgagtgcgctatagatagagcctgcccaatagttgcgcaatccgaaaccacgtgccttgccgtcggtaatccattcttcaatgatttcctttgtttcggtattgaagaatacgacttcatacgtacctctattgtttgatttgtccaggaactgtgcgataaacaccatacctactccgggtgttttctggataggcaatgcgttgatggctgctttgatttgctctttactaagagtatattctcttttagcagtcattagctcggtcaggtcgatgttttcgttcacctgattaacggcatccagtgaaatctctgtcacttcttttttcaattgttttcctacgttatacttcttagcttctgtgatgaacagttcattgatacgtctgaaagcatctttgaattgtgccggtgattcatctgcaccgaaaatttttacttgggagtagtctaccccatagaacttaatagactgaatgtctttcaatgcactcttgccttgtccgaaacagaacaggctcgtgctcaagaataagaatagaataagttttttcatatacgttaatgttaaagtgatatagttggttactaacttccaaaagtagaaaataattatcgtaaatcaatgaattttatcgtttttcgactcattggaggcatttgtatcttggcaatgtactctgccgattcaaaattgatgcttggcgccactctgactttcgaacggaacagatctttaatctctttggcaaaggcttcgctacggttctcgcttccgatacgaatcagaatctcatccgttcccaattcattggtataaacttcaatgatatagttttttaccgaaggtatattatccagaatgtcgaataatgcaggcggatacaacgtcgttcctttgtatttaatcatttgtcctttccggccgaggatggagcttaggcggatggtatttctcccgcaaccacagggatcggtgtggtggtaacaaatatcacctgttttgaaacggagcaacggcatacctttgactccgagcgtcgtgatcgtcacttcccctgcttctccctcttccacaggacgattgttatcatccagaaactctacaatgataagttccggttgcaaatgccctccgtggaattcattacactcggtaaaggacgactgcatttcggtggaggcataagtggaatacaactgcaaggcaggccatttatcgtgtattttctgtccgagcgtattcaactggaattcctgattgcgcaatgcttctccgatacagatgcacttctgcatggaacaggtattatggttgatatgattcttttcggcaaactctatcagtttgataaggaaagaggggactaccattccacaagtcggatgtatccgtcgaattgtgtcccattgcagttccgggatgccgttgcctacacggatcactcccatacccagttcgcgggctcccatataatatgccaagcctgccatgaaacggcggtcgatggtagtcatcaattgaagaatatcttgcttggtgcatccggtggtggtgaaagataagtattcgttgtaagaaagacggtccaggtcttcagaggtgagaacgaaagtgaccggatctcccaatgtgcccgaagtcgtcacatagtcgataatttcctctttgtctacgcagatgaaatcatcgttatggagttgcaggtccgtcttggtagtgacggggatctgttgcaagtcttcaatcgtctttatttgattgatatcaatgtgatgttcggcaaacatctgttgatagaacttggaatgtgcttgcaggtaggctaacactttggctaactgttcttcctgatagcttttgatatcttccggtgagcggaactgaatttcaggattcttttccatctttggattgtttttgaattttctgttggatacgttctttctcttgcaacttgggaatggatttcttcaatgcctgttgccagtatgcaatggcctgtttagattgctgcatggcctcgtagtaatctcctattacttcatatacatagtatagggaaggattggaggcttggtatgtttttaaaacagattcctctatctgttccttttttctgattttcttcaataaaagcggagtcagtttcttatacgtgagaagatgctggaactccggtgtgtcgatgaatttatcttccggaatggtcaggtcggaactgtatatttcgtgttgccaatcaatcgtgtctttgaatatcttattcaggtcataggctacgtatttcccacattgccagggagaggtcgatacccacatcagccgtttctccggttggaagatgacggaatgatgggcaataaactgattgatggccatttcgttggccagtcccaggtctgtgttttgcaggcctttgtggtcacgcaggatagaggcggctttggagacatcgatcggaagatcctcattaatgagttccgttaatcgtgcaaaacggtatgggctgtcggaagtgcggatattttccatgtttcgttcgtccttgctgaattcttccgattggtaatggttggtgcagatgagccgattggcttcttttccggtgaaaagcacagttttctccggagatttctcgataatcgcggctttgccatctttggcagaacctatcaatatggattcggagacgaatgtttcccgttttttggcgatggcaaaggcttcatcaatagtggctgcatattgcagaatctctctggtcaggatggaaatgggggtggcggaacctgtggggacagcagatttggcagcattaattgtcacggtaagacctgtctcgttcatgccggataacactcctatcataccgggccatccgacggaagcaaacctgtatccttgctccggtacataaaaagccacctgcttgttctctgcgaaggcatctcctacatagaaatcgaagttacgtccgatcagcagggatgaatctgcactttgtgttccccaagtggcgaacgaactgcatcccactaacatataatcttgcatggcatgtcccaggtcgtgtgccgaatggtaattcaactggcgttcgtaaggagtgccgatgaagtcgtattcatgcgtacatgatagcgagattccgtagatctcgtcgcggtattcttcgaggacgttctcacccagattacggttgaataatacaatgaagaaccggaggaatttcagataactgtctgaaggaacaatctcacgaatctgatccacgaacactttctcttgatggtggagcaggtcggaagacagttgcccgatagcttctcctctctggaaagcatcccctttcacaaacaattcccataagccgctgtcgctgtgccggagaaagttatctccataatgccggaggtggagactgtctatatcaatcactttgtctgtggtcatgctttgctcatgtttgggcgtttgcatatccgcagaaaagtagagatagctgattccggctatcaatagaacgatgagcgacaggaaaaggaagcccgtgtattggagtgtctttttgactattctatgcatttcctacttttttagccagatattcttgtcctacaaactccgcacaagtcagcatggcagttagtgttacccctaatgcaccatgcacattcaggttttgcccggtgagaaagagatttcccaagcggcttcttgtagatacgaaaccaatttgcggacatttataatctttgataatcccatacgcggaaccatccactgttcctgtatagtcccgatagcttaatggagtagtggtatacatctcttctatgttttctgaaaggtcaatgccatgtcctcggatgaagcggagaatctgttctgctttctcctttttgaaggattggtagtcttctccccgatgttcgggagtcgtgtccttccaggcagacagttcatctatatacataggtgtcaggatggaaatgacactggcatattgactgtcctcggaagacgcttgcatggaaatcatacagttggtggtccgtcccggatagagcagtttgtcataccacactttattgttcgcatgcagatacaggttgcggttctgataaggagtgctttttttcttcattaccaggtagagcgtaaaaatgccgtaggtattttccaacgaacggatgcgggaaatataggcattcttgatgctacggtttttatccagtatctccaatgtccgttggggatgcatattggagatgacgaagtcgctttccagtcgctcttctccattgatgataaccccttgtaccttttcgttttcaacgatgatgcgggtggcttcactgttattgagcacggtccctccgtttgcccggattacattgattagctccagactgacttgcatacttccgtctacaaaacggtaggcgccttcaatataggagtgattaatcatggcatgctggtagaaagtggagacatctttcaaacctccgtagagtaaagctgaacctgccagtacatttcgtaaggcggggtccggagtgatatccgcaatcagatgggcggcagaggtacaaaagtatttcataccctccaaagcgagtgtgccttgtttcaggtggtctacgctaatcaggtttccgacagcctgaagctgttcggcatagcatttcaagttttctttctcatgcgggaaggaacggcagatggtttcaataaactgcgggtatcccattgcataatcgtatgtttttcctttatagtagatcgtatcaaaagcagcatcgtccaagcgttttattttcagcttgtccatgataccgaaatagcggaaatactggttcatcacttgaccctcatccaggcttcctacataatgaatacccgtatccaacagatgcccttttcgttggtaagtctggaagcatccgccgaattgcgcatttttttctactacgcatacgttgaatccctctttgctaagaatcgctccgcattccagtccgccaaggccgctgccgataatgatgatgtcatatttgctcatactagttcggttttctaaatatgtaaatggtgtttgatgtatatttgtcattaggaatgatttcgacagccattccacaggcgactgctatttcccgtaattgggtttcagtggtgaaatacagttctccggttgtccggttgaagttgaagatacgggtggatagtaattccgtgaaccgggttaaccggtgcttggaagcgttggctgaatttccgtcgcgtatgataatcattccttgtgaacgcaagcgaccggcacatttcaacaatagggtttgttgatgttcgtagctcatatagtgaagcatgtcgttcaggataaagacatcactttccggcaggggatattccaatgcattgccatgcttgaactggagatgctcgttgcgtaaccatccgtgctgcgccagcgctatcttgtcttcatcgtaatcaatacccaggatttcccggtcctcggaaagcagagacagcatatagcataacgggccgaagccgcaaccgatgtctgtgatttgcccttggacgggaatcaaccggttgaatagccggtaattcttttccatctttactttaatacggatataccattctacgacgggacctttatagatatagttctggataagagcttcgtagaacgccggattgtccgtcgtgttctgttcacggcagatacgggcataaacctctttcatgtaagcggatatgcgtttggtacgctcctgataagtacttccgaaagacagatcgtctagtggtatacggggaagtatttctgtatagatgattcctttccggatattgaaaggctgtgctttggcaatgattttgttattaccgtaaagcaggatcggcagaatatccagtttcaatgcttctgccagatagaatgctcctttgtggaaacgtttcatctttccgttataggtacgtgtgccttccgggaaaatggcgatggagtagccctccttcacttttttccgcatccgttccatatattgctcgtatccttcgcctatataatagaagtcgacataacgaatgatggctccgaagaaaggagagtgccatacccaatggttggttaccatcaggattttagatgaaagagacagcaataccagaatgtcgatgaacgactggtggttggcaatgataattgccggatgccggaagcgttcgttggctttgttgatatgttcttttttgacggcggtggccagtagcaaaattcctttgcaggtgatttgtatcaggcggcacaccaaacgctgcttgctgcttttgcgcacaggcaccggataaagcaggataatcaatatacggaggacgatgcagccgataaagaaaagcaggaagagcaacacggtacgtatcaatccgataagcgtataaggcggtaatcctttggaagcggggcctgcgatgaagaaccggaaaatgagtggctgaatggtataagccaccagtaccactgctatcatacccagaatggaaatcagggaaatggattgcaaagccgggtgtttggcaaacacaagtgctcccataccgaccactgtggtgaaggcggagaagaagatggctgttttatgggaattcaacaccttctgacctgtacggtatttgttttgtagcccgtccataatgaagatactgaagtcatctccaatgccaaagataaaggtggacaggatgatgttgataatattgaactcaatccccagaattcccatcaatcccaagatgattacccagctgattagcattgggagaaagctcatcagggtaagttcgatacgtccgtaggagaaccatagtgcaaagaatatgaggaaagaagagatgtacagaatcaggtaaaagtcgtcattgatggccgatacccatttgttggcaaaataggaacggtcgaagatgactacattcgggtctttattaaagttctggtacacagcttccttattcggttcgctgatccgtatctggctgataagcatggtgatggaatcggcagaggtttgccattcattcaatagcttgccggataaatcgtcttcttgcgcggtgtaatgatattcaccgaaaggctggttcatccattgataaaaaggttcgaagcttcccgggcggaaacgatattcggcggcaactgtttccaactgttcacggacttgttgctgtttttcatccgtccagtaatctttccatttcttcaggcgtttttgctgctcttgcggagagatcagaaactgtgaggcggaggcatactctttgatgagtccctgctctttcagtgccgataacttctgattggtcgttgcataaatttcggtagcctgattcatgtctttgcccacactgacaaaaagcacggtcttttcgtcgttgtcgaagagttgcagtaatttttcttccgattgttggagatggcggggctcatagttgagactcatcatatcgttgttgaagcctaccttttgcgaagtaaacaaacagatcactgtaatgaggaggatgccgcctaccagccatttattcttttcgtaagaataagcatttattttctcgatgatgcgtagtatgcgtccctgtttgacgtctgcctgtcctttcagaaaatgaggcaggtaaatgagacagaagagggtggtgcccaccaatgccagagaggcaaacaatccgaagtcgcgtaacagatcggaactggtgaatatcaatcccagaaatgcgccgatagtggtgaaactacctaccgtaagcggataggctatctctttaataagttgttgaacggtggaaacatggttctggtgtgccagcatgtgaatggaatagcttagtgcaatacccatcactgccgaaccagctcccactgcaatggcggagatacttcctttgataaagaaaatgagaaacagggcaaataatcctccgaacagtactggagtaataatcaacggtatcgatctctttcgtttaaaaacgagtgagatgaatacaatgatgataagcagtgccagagaggaggtcaggatggtatctttcttaatctgacgggcgttgtagactcccacggagggaccgccgaagtattcagctcgaatggtaggagattctccctgtacgtgcttgagctcttcttcgagtatctttatcagttcgtcgttctttccggtgctgcctgtactgaataccggggtaatgaacataagtaaggtggaaccgtctttggagaagatatgttcgtcataaatctcgtagttggcttccaactggaaatcttgcaaatgtttcagggtttcgcttcccagtccgagcgggtcccggagaatatagcttcttaatgcaattccggcaggagagaggagattggtataattcttttgcatgacagcctgtatccctttatccgtcagtaaggaatcgaagcgttgatagtccgtatctgtcaggaaaagcggaagatgttcataaacgaagtctgtggctccttggatgaggctttggtctacctgtgcgagaattcctttaatcagttttcctccggctttttcagtcagggtttgttgcagttgtccggctgcttctatcagggagtcgggttctacgcggtggcaggtatctgccgaggataacataatgataatcttatccttaatcttgagattgtcgaatactttgattgtgttctgggaatctttagtgtcggggaaaaattgtgtgatgttctcttcgaaccttacttgcagggcaaagaatcccattaacaggacacaactgatgagtgacaaatagaacagaatcttgtgcctctcgaaataatcatatagtccgataaaaaactgggtcatatcttttttttcctacacgccgtgagcagaatgaacgcgatggttcctgccagtatgctgcaaccgactgcaaagataacacttcctattaaatattgctctatgactgattttacattttcaaaagaaagttcgtttaaatgcagattgacaggatctcccagcactttgcaaccggttacgtaactgccgtacagcaaaaatggaatcatcggagggatactgatattggctgctacaatagctatgactttattcagtctgaacaaatgtgccagaaataacgtgattagcatttgatatccccataccggaacgatccccatgaatacgccgagtgtgatggcagccgtgatccgcagattagattcgggggagtgggtgacatgatccgagaaaaactgcttgcagttcttccaggtcagtttacggaagaagtttcgggggatgatccaaaggaaagtgacgagcaccagtactgtgttcaggatactgatacgggtgaaatcgcggaacggtcggaaatgagaaactcgctcttcctgtggcggataataaacatgtaccggaatgtttttaacggtaatgcctccccaggcagcaaagacaagtgcttccaactcaaattcgtatttggcggtgtaataccacttgtccacattcattcgttggatggggtacaggcggtagccggattgagtatcttgcagtttgatacctgtttcgagggtaaaccagaagttggaaaacttattggcaaatgtattctttcccggcatgttgtccgaggcgaggttacgggcacctaccaataatgtgtccggttccttttctatggattcgatcaatgcagggatatccgaagcgaaatgctgtccgtcagaatcaatggtgatagcataccggaatccttgctttttggcaaaggatagtccatgtctcaaagctactccttttccttgattgacagggtgggtgatggtatgtaagttagattcccggctaagtatttcggctgtttcatctgtagaaccgtcgttgacaacaaggatatcgggggcgtagaaacgtacactttctatgacgtccgccagtgtctttccattgttgtaacttgggatgataacgatgatccctaattgtttcaacttctcgtgccaataggctgtacttatttgttccttcatactgtcggggtaagtgcagcttttagtttgatgaaacattcgttctttacggtattttcctctacagtgctctctttcacagtactcttttttacagcttccttctttatagtcccttccgcttgcaactgaagtgtaccttcttctgtctctttaaaagtcagtgccaccgaaatgtgcggtgtttctataggattgatagccgaaagaaacttgcaggaagacacttgtgttacttgcaatttttgctggcgaatgtcttctacacattccttgataagttgtaacaggcaaactcccggaactaccggatgtccggggaaatgtccctgataaacaggatgcccgggattcaactttacctggatagtccagatcgttgagtccgatgattcggaggaaaggatggtatagaagttatcaagtagcatatattaaatctctttagatagtttgtccagacggatcgttaaccgaatccacggatgtttgatttttatttgtgcgggatcgcccggagtattgccaatgatgtagaccactgactttccaaagccttttccactggttcttttttcagtagcactgtctttagtcgttttcacacgaatatctttcccacttaagaacagacgtctgaaatccatctccagaagtttcagcaccttttcctttttcatgggttcaatgcaactgttgacagtaaactgatcgttgcgtagagaaaaatcgaaaaggcttagtccgaagtaagtagacgctacgatccggatttcgttatcaggcatacggcgtactattagcataccgctcatgtgatgtttcatgaaatccagttggatattgtatttttgcgagctttctccttgtgttagttcgatagcggggagcacagtacttccttccccgctcatccgtggagagcaggaagtctggatctgtatccataagaacagcagaaccatcagactaacgaatcgcaaacttcgtctcattcttcagggagttgaactttttattatagaattcgtattctgtatagtttgtggctgtttcggacagacggagtttgtgtaccgacatatctttcttgtccagatagatttctataccggcaatataggcttgtaccgctttgttggtcggttttattttaaccagatagtatcgtgcgtcttcaaaatactccagcaggtagttggacgacattttagacaggtcgcctatcatacacgcggtcagcatatcctgcatctgtgccatcattttgttcgaactaagattcatgatacttttcttgccatccgaaacgattttgagcttactgccgtttatcacgatgagataatccatcgggcggaaatattccatgcagattttatgggtcttctggtagtagaacttccctttggaagtaaccttctcatcgaatacatcgagatatttcacttgggtgaaatcgctttcgatggactctacggtttgcgcctcctttgccaggcggctttcaaactctgtcttttgcgccatctttttcatgctctgggcatggatagaggctattgacaagaagaaaagcgataaatatattaataaagttctcatacctttttttattttatgccaatagtttgtccggacggacaacggtatatccttgttctttcagcaaatccaagatttgtttcactagctggtcgctgtcaggcatccggtcgtgcaacagaataatggctcccggttcaagatgtttccgaatcctggcaaggactttatccggtgcttgttgtgtatccagtgtacggatgctccatcctataggggtatatcctaactgtcgaacggctttcgcaatcgttggattagtgacaccgaacggcggacgaaacaaactaaccggctgcgaagttactcgttctagttcacactgacaagtttgcaagtcttttttcatcttggagagcccgtatagcgggaataaaccggaatgggtatgcgaatgatttccaatcagatgaccttctgccaccattttttgcaagattgcttcattcccttttaccttatgaccgatacagaagaaacaggcggttacctgatattcttttagtacctgcagaactttgggagtctgtagggagtcggggccgtcatcaaaagtcagggcgacactcttttccgcagtatgctttttgcaaaatgaccggaggtaaattcccgattgaatgctataagaggcataaacgagaaaagacaggagcaagagcaagcaaagaaggaggcaaacgattatcatacgcttttccggattagaatcaatgaatgattgatggagtggtgatgattataaatcaatatatgggtcgaggtagtgcagttggccgattcgttcactgctttccataccgcatacgatgttgcggtaggatattcaccacattcattcttaaaactaagatgaacactttccgggaaaaggtttgtttcaagctcttcataaatagagttgccattgtcaacagtttgctcgtgagagtcatcttgattgtgtggcttcttgtttttcccggtaaccaaccactgaatatcctgacattctaaaccatttcgttgcaaaaaacggatgattcgggagctgatttcttctgtagtctgtttccctatgaaagtttcgattccctgtatttcagccaacggatgctctccggcttcccgacttaacaggaagaattgagcaccttctcctgctgctatccctttcagcactcccagccgttgctgaatcgtgtaactggtttctgtcatttcatcgatggctcccacaagtatattctcgcttccttctcctattttcatcatagcgtccaataaagcactttcaaaactaagaccacggtggacataagtcatgttgtaggcatgtatttgatgaatcagagctatttgtgcaccgattgtattgaatgtcgactggataaaaggagtaggattcagcatccgctcttcattatccaataggttgttcaggaatttttccgtatctgtcaagcagcccaatcctgttgctgtgatgattccttgtatcttttcaggagatagttcacccatacattccaatccgcaagccacccccatttttacgatacggctcatgcgtctgcgcaaggtcgcattggtgataatatccttataatcgggttcgcaagcctgaagataagggcgattatttcctggtgaatgatcctttggcggatgaatggaagcgatgcgttgaatataaactggctgcataggcttaaatacttaaaggtgcgtttatgctggaaaattcgttgcggaaaagaggagcgatgaatcgtttcctccgaaaccgaaagagttggataacacatgtcggatggggattccttcttgaaaagaggtttccggtatcagtcctgtttccggcatcgcatccgtaaagttcaggttgggataaatcagccctttatctattgaaagaacggagtaaacagcttcaattccttcggaagctcctaaggtatgtccgataaaagcttttaccgaactaaatggcggaacgtgttctccaaagattcttcggagcgccatgccttctgacgcatcattgccgggagtacctgttccatgtacattgatataatcgattttttcaagggaaataccactggaagcgatagcttcactcattgacagaaaggcaccgtccccttcaggagaacttcctgtttgatgataagcctcattcgtattggcgtaaccgctaagttcgcaataaggagttctttggagtgaactttccgattgaagcactaagtaaccggcaccttctcccagatttaatccggtacgtgagcggtcaaagggacggcaatgtgttttgtccaaaatcatcagggagttgaatccattgagcgtaaaccggcaaagtgcatccgtacctcccacgatagcagcatccagtagcccgtgtttaatcattcttgctcccagcatgatggcattggctgctgacgagcaggctgtactgatggtggttataaaatcattgatacccaaatacgaagcaatcaattctgtactggctccgcagtcgtgtgaaattacttcccgtaaccgtccctgtcccgggtttttcttgaaagattcatagaagtgctcgctcaaatccatgccgccaacggaagtggcggaaataaaaccgatacgtaatggtggtgtgagtcccgcatctttcattgcttctttggctgctatcattcccaacaaggccgtacgtgatacagtgcgttgcggaggtaaagagatcagttgctttagttcctcattgctacgtttcacttcggatacgggcacatcgagagcagtcggaaaaagagttacttttccgatgccatgctttctttgtctcaacgcttctatattttcggaaactccgataccgatgcccgaaacaactcccaatccggtgacgtatatcttcatcggttaagctttgcgattagcaatgatgtagtctgccagtgtacgtaccgagtagaagatttgttttccttcactggggttctctatctttataccgtattcgcattccagaatcaggatgatttcgagtgcgtcaatggagtcaaggccaagaccttcgtcgccaaacagaggggcttcattgtcaatatcttccggagtgatttcttcaaggttcaactcttcgattagtttccctttcacttcgtccatcagttctcttttggtttgatctaaattatccataaatcgttgatatattattaagttgtttaaattctgcttgataatgtccgtccagtagttcgcaccagcctatgatacaggtgcgtaacttaccttttgccatcacaatccttgcataatcctctaatgaggcagcatcggattgccgacggacaaagaatgtattctctccctgaatcttgtgccggatacagatttctcccaatactacattggggagagtgtagacaaacacggcaggactggctgctttgtccccttctttactgatgattgcctgatgtttgcagtccgtatccagagaggaagaagcattggcaagaatgattccaatctcttccggacggtggtgtgtatttttcagtaaatattcggcagctacatatcccagcttacagaggttgtccatcttatagaacttcatattgttttctcccagatgcttgtatgcttcccggatgaacggtgcaaagtcagtttccgaagagctgaatacagttgttcctttactttctactgctcctggcctgattgtgaccatgttgcccgattccaccactgctttgcaaactgacggagcactcgctttgtcggttgcctgcaagtttactttctgtttcaggtgagcatcggggagggataataccagtgcggcattacagcctccgaaaccggaagcggttttgatgcagcatttcatcggcatcggctgatgagtggtatagacagtgataggcatgggaacaccgagtgtttcataccctaaagttccgtagtatcttccttcttttagttgctctatgcaaagtatggtttcgataatgcccgaagctcctaatgtatgaccgaaatagggcttgaggctattcaccggaactgcagctaatcccgccagatgtatggctttggattccatttcatcattgtaaaccgtagctgttccgtgtgcattgataaagctaatgtcttcggggagtgctccggcttcttccattgcctgattaatggctagagctaaaccgtcccctgttcgggaaggaccggatatatggttggcgtcattgctgattgctcctccggagagaataatatgattcgcgtttccttgagtttctaaaagaacagctccacaggcttcgcccagacttaatccatcccgttgtatatcgtatggtcggcaaaggtgtgcgctgacagatcgaaacgatagaaagccgctggtaatgaaatgagaaagaatatccccacctgccacaatcactcgtttgtaacgtcctgattctatccatctcttagcgacgattagtgccgagactcctgatatacaggcattggagatgacctctacctgatttgtcgctccaaagaaatctccgattcgttccgccgttttccaaagaaaaaccggactgtcagcaggtaattcactcaataaatctatatttcctttagtggtagataataacaaggtacaatccggctcccgcaagtcggctcccgattgagaaataacctcttggatagccagtatgaataattgctccattcgggtataatccgtaatctgcatcagcttcgcccgtttttccaattccacagaatcaatcattcccgccaataggggatgatcggaaattaggccggcttcttgcatacggattccgcttcggtagttatggatggcttccaggttttccgggatgccgaaacctaacgaactaatcagcgtatgggctgtgatgtatatatttaaaggatattccatttctttttccattccagataaaacggaggattcataagctccaattctttattcaggttcaggaacacttgtatggtgcttccggtggctactatactctggtcggtagcccggtagataatgtattcaaattttatcttggctgcttcacaggcaatatagcgcgtttcgacaatcgcttcttcaccaaaagatagtgattgtttgaactgacaggttaaatccacgataggaaccatgtatccctcccggtaaatactcatataatccaaaccatactgtttgccaaaagcttctcttccatcttcaaaatagcgcacatactcaccatgccatacaatctgcatggagtctatttcgctgaaccgcactctgaaggtagtccggttagtcaaagctgcaacctgttgattcgttttccgtttcattctttttttataaatattttcatcctgcattcagctatcagcttgtcttccactttcacttgtgcagaaatcaatgtaatgtcgaatacctcctgtacaacggtaatctccgtaaatagtttcatcccgttctttggcaaatcgtagattttaagtttgtctaccgagccgataaaccctaacggtactttttcaccctgccgggtataaagaaatccgatacgtgccgctgctgattgagcgatgtgttcaataattcctgcctcttgcagttttccggtttcgtagaaaatattatcagcagtaacagtcagtccggaataagaatgattcttttcgataccaaagaaactgtccaccatcacgatgggcggacgctgtggaatcaaattgagtattccttctccttgtatgataacttccctgttgttcatttcaatctgcattgtacaatgctgtgtcccattcctaaatggtcatctatcttttcaacttccaatcccgctgctttgatgcaccgttccatatcatccgaatgatacattttgctgttaccatttgccatggctgtgaaataaagactgatttgtgtcaggcaataagcggctgtgtcaaacttttgccggttccagaaagtttccatgatatagaggcgactctccccactcatagaacgggctgcacgggtcagtatgctggttacttcttcttccgagaaacaatcaaggaactggctcatccagatagcatcgaaccctgtcgggaaaggtacttcgggatcgagcagattggcgccatacccgtgaatacgcattgctccgggtaggtctttagtttgttgacgcatcatctccaattgttgcggaaggtccataatagttacttccactgcatcgtcatagcttacgcatttggtcgcccatcgaccggtattacctcccacatccagtaaagtcttgggatgacgggcgaaaacaattgccaaagcttcgtcaaacgagcaatccgagtaataatgatcgaaaccgaaccagctcttttgtacctgtgagggcaagcttgacagcccttcatagatagtgctccattcgccgaatactttcagccctccgggacgtccgttggtgagagcctcttcgagatggaacattcccagatagttgacatcgtggttgaaatccatattgacacgtaccatcctgtcgttgagcaggaaccatccggctttggcaaggcggtaaaggttttcgtgccgcaatacggtaccgatcgttaatgaggcttccagcaaaacttgtgttgcataagaagacaggccacaagccttgctgatttcttcttgtgtcatgcctgcacgttcgtcggctagtaactggaaaataccgaatttgagcataaggcgtgatacctgaaacacgatgggcccgaaagctatttcttgtgccaagcgttgtgcctctaccgcggtcaacggttccttatcatattgattctgttgcatctttattttgttatatctttatttcaatcctttggagggcgaaccgtcactcgtggttttccagaatgagtaatagttgaaccattgttccggatggcgtttcagtatttggtccaaagcggccgtatattgttcgagcagagcgatctctgctttcttttctttggttcgtatgactggttccgtccttataaaatgaaaacggtaggttctgcccggctctctcatggcaaagtagaataccaccggaactttcattcgcgaaccaagcaagaaaggaccggcagggaaaggagctttctgtcccaggagtgttcctgtcagcagtttctctttattcagataacggtcgccctggaagcatacatattctttcttgtttaacgcctcggtaatacggaaaacgtgtgtcaggttatcttcgttgacggggataatcttaaaatccttgtcctgaccatttttctccaatatctctttgattctacgatgttcggcatcatacatcacgatattgattttctttccgtaatcgtcgaagaaaggaacgcctatttcccagtttcccacatgggcaccaatcataattactccctgttcgctgttcagcaattgcagaaattccggataccgttcgaactcaaaccggtattgatcgacttttccgttaccaatagctactttgtcaatcaggatttgccctaaccggtaatagttgcgcagcaacatacccaaagagcgtattcggttgtatttcagaatgtggcgggcataaaaccaggtgcttttagtggctttcggagcaaacggtacgaagtacaatactaccagacttagaaatatataagcggcagtaatgcccagatacttaatcaggtaaataaagaataagtatccgaatgttcctccccgggttttgcctttccacgtcgacatatttacttggcttcctgcatacgggtgataacgagatcgtagaagtcctggaaggttttgatacccgcaaaatcttgtccggttacgttgaagccgaagttcttttctaccagtaccaccatatcgaccaagtccaggctgtccagttcaagagtttccattaacggtgcatccggctggatgacgtcgatgtctacttcaaactcttctgccagagtggttcttattttctcgatgatttcttcgtttgtcatatatctgttttctttagtaaattatggattgattttgcgtatgattagcgtggaattggttcctccgaatccgaatgagttggaaaggaacgtatcaaattccaggtttacccgttgggtaggtatatttaattgtgcagaggcctcgtccggttcctcgaaattgagattgggagcgatgaaaccgttgttcatcatgagggtggaataaatcacttcactggcaccggccatccacatttcatgtcctgtcatggactttgtggaggtcacatatgggtgatgcccttcaaatacttccgcaatggctttcgcttcgttcaagtcacctaccggagttgaggtggcgtgtgcattgatatagctgatctgttcgagtgcaatccctgcatctttgatggccatttgaagagaacgtttcgggccgtccacattaggcacggagatgtgatctccattggatgaaaaaccgtaaccgatgacttcggccaaaatgggagctcctctttttacagccgattcataactctctaataccagactggcggctcctccactcggaatcagtccgtcacgtcgtttatcaaaaggtttcgaggctttctcgggggctgcttcctgggtggaaaatgcgcttagtccgtcgaaacttcctactgcataaggattgacttcttgtgcgccaccgcaaagaatacaatcctgtaatcccgattttataagcaggtaacccataccaatagcgtgagaaccgcttgcacaggctccggcaatggtgaagttgacccctcttagtttgaaaataactgacaggttcattgtcacggtggaattcatcgactggaaaatagaaccggaacctaccagtgcagtgtttttcttttcacgaatgatgtccactgcattaataacaggagcggcactactatcattgccatacaaaatacccacttcattggcttcgagaaaatcctcattaataccggcattacggaaagcttctaatgtagcgagataagcatattctccctgctccggtagacagagacgtttacggcggtccaacaacttcttcaagtcgggacgttccaatatccccgttaatgcagaaaagtaacccaattctttccgtaccgggtctatgccaattcccgatttcccattatatagtgagtcttttacttcatccagattcttgccgatgcaagagtaaatccccattcccgtgataacaactcttttcattattttgtctattctatgcttttattttaagtatatagtcctccgttgatggaaatcacttctcctgtgatgtaggatgaggctggagatgccaggaaaccgaccaggtcggcaacctcttccggagtgccgaaacgtcccgcgggaatatgtttcttccattcgttctcatcaattccttccgtcatatccgtacggatgaatcccggagctactgcattgactgttactttcttcttggcaacttcctgtgccagtgctttggtagcagctattacgccacctttggctgcggagtaattggcttggccgggcattccctgaatgcccgacaatgacacgatatttacgatacgtccataacgtttgaccagcatattcttcaataaaggctgtgtcacgttgaagaatccgttcaggctgatatcgagcactttgctccattcttctcctgtcatccagagcatcaggttgtctttgcggatacctgcattgtttatcagtacctcgatatattcgtcagggtgttgggaagcccagttgcccaaagcaagggtgatagcggcagggtcggtcacatcgaacttcatcaactcgccattacttcctttttcctgtactaactgcaacgttttctccgcttctgcgtcattattctgataatttatcagtataaagtagcccatttccgccagtttacaactgacagcacggccgatacctcggcttcctccggttactaatgcatatttcattttatttatcttcttttttgagatagtctatcatcatttctatctctttatatttaggtgtgtcattggtaaatacagggaagaaactgcgtatttcttcataaacctgcctgcttttggaacttaggcgatcctgtattttcaggtagtcgatagcttgtgccattcccataaactggatagccatcacctgataagaattctcaatgactgtttttgctaatagagccgagttggttcccatgctgacaatatcctgattatcattgttgttggggatactgtgtacatacatcggatttgataatgtctgacattccgctgtggtggaggttgcagtgaattgtgaagcctgtaaaccatagttcaatccaagcactcccaaatttacaaacggaggcaggatgccattgatacggtcgtggaacagatagttaatctgtctttcgcaaagcatagtcagcttggtcacggcaattttcaacttgtccatttcgaaagaaatgtaatctccgtggaagttgccgccatgataaatattttgtgtatccggatcgacaatcggattgtcacaggcggaatttatttcgtttattaatacttcttccgcattctccagttcatcgtaaataggaccgagtatttgcggaacacatcgcaaggaataatagggctgtactttgtgttcgaagattttctctttatgcacctggttgtatagctcgttctctctttgaagcacgcatttactgcctgccacccattctctcatcatagcagctatctcttgttgacctttatgatgcttggcctcgtttaatgactgtgccataaaatcatcataagaggcggcaatctcattcatcattacagaggcagccaccgaccaacggagtagtttttttgcataaatcagattgacaataccgatgcctgtcattacagaagtaccgtttgtaacggataaaccttcacgaatacgcatggaaaaaggtttcaggccgttttcctgaagcaccgtagctgcgttacacaatttaccctgataaaaaacttccccttcccctattaacgtcagggcgatatgggccagttgtacgagatcgccgctggcacctacacttccgtgttcgggtatgaacggataaattccgcggttgataaattcacagaggagagaaaccagttccagatgcactcctgacttcccttgtagaaaagtgtacaaacgggcaatcatagctgcttttacataaagttcgggaagcggtttgccggcaccggtggaatggcttcggatgatattatactgaaggtcgatcaatgactgatcttctattctgtattgtgccattgggccgaaccccgtattgataccataaataatcttatcgctggaaaaggattgcagaaaatcgaagctttcctctacttttcgaatacattcttcagagagttccagcttctcattatcaaacaatactttatgaagggtatctaaatttatacttttgtcagctatcattttctgtactagatattttatgccttaataataaggtgcaaaaataggcaatttctgttatatagcggacatgaatcaggataaaactttttctaaggaattggttttgcttgttttgtttcttattcgtgggagatttgttccccggtaccgctcgatgctttcattggtgccggagggtgtcttcatcggtgggggggaatcaatctatgctttttgcaaatcccgtccttcatacttgcagatcgcttctatccattccttggttagtggcatggactcatgtctttcaagattgaaagtaaccatgatggacttgcaaacacatttcacctcattggttttcgtgtcaatgacttgttgaaccagatgaaagcttttggtacctatcttagagacggcggtttgtacagcgatgtggtccgatgcgaaaatttgcttaacgaaattcgcttcaatatgaacaacgacaatgccaatcttttcccaatctactcccggacataccgaaccgaagtattcagtctttcccaagtcgtaaaaggagaagtaaactgtgttgttgacgtgaccaaatttgtctacatcattgaatcgcaattggataggtaatgtgtgatgaaatacgatttcttccattgttttctcttaaacgttttaaattcgacacaaaaatagcacttttgctttcttgcttgaaattggggcaaagatagatatttctgatgattctgttctcggagacgggggagaaattagttaataatcgtttaaactggagttttggaacgtttattctgacttctgatatgtggaaacaatcagaaggatggaaaggaacttttaaatacggattattcttaacttattatcttgtggaatatgtccacatttctgtggaatttttgcacaggatcgtgcttgaaacttaatctggttattaatgctttttttctttattgcaaattgtttatgtatttgaaaattagtgatataatctcttttgttaaacttgataagtctcgttgtatcagtcttttgttatgcttttggcacataaattgcccaatattgatggtaatctatcctaataactattctaattttagaacaataatggaagtaataatgaaaaacaaatggctattatgcattcttttaatgctgtttctgcctttcggattattcgcgcaggttgctcctcctcttgaaaaacagaagacagaaacacaggaagccccggaaaataacaatgaagttacgacaaacagcgatactaataccgacggggatgctggaaagacaatcaaaggagtgattaacgacgaacagggagagacaatcattggtgcttccgtcattatcaaaggtgaagacaccggaactaccagtgatatggatggcaggtttactctcgaagctccggaaggagcgattttagtgatctcttacatcggctatcatacgcaggaagtgaaagtcagaaagagatctcttcttcgtgttgtgttgaaagaagacaatcagttattggatgaagtggtagtggtaggatacggaaccgtcaaaaagagtgaccttacgggtgctgtgtccggtgtatccaacagacaatacaaaaatcaaccagtacaacgggttgaaaatatactccagggtcgtactcccggtgtagaagtcactgctacgagtggtatgcccggagcaagtatgaaggtgcgcgttcgtggaactacctctattaataaaagcagtgatcctttatatgtgattgacggtatcatctcttccagtggcttggacggtattaacccttctgatatccagtcgatggaaatattgaaagacgcttcctccactgccatttacggttcccgtggttcgaatggcgttatcctgataaccaccaaacagggtagtgagggaaaagcacaggtaacattcgatgcatcgatcgggctttcgactgtcagaaaacagtatgacctgctgaacgcctatgaatatgcaactgcactgaatgatattcgcggatcgtccactatctctgccgaagaccttgaggcttataaaaatggaacgaaaggaatcaactggactgatcttctgactcgtacaggtatcactcaggattatcggcttgccatatccggaggaaatgaaaaagtgaaataccttatttcgggaaatgtgcttgatcaggaagccatcacgatcatgtccgattataaacgctatggaattcgggcaaacatcgactcggaagtgaaaccctggttgacaatctctgcaaaattaaacgcatccagtcttcacaaacacaatgaaggtggggcgaactggttgcatgtcactaacttttcgcctaccatggagctgaaagatcccgaaaccggcgtgtacaatacagacccgtataatatgatcggttccagcccttacggtgaaatgatagtgaacaatagcgatagctatagctataatttaaacgccaacctgacattgctgtttaagatcatgaaaggactgacgctttccgttcagggaggttatgactacgataatagtccttcttattctttccggtcgaaactggattcaccgggtgctatcaatagcgcaagcaataccaacgcattgcataactattggcagaatactaacaatctgacctggcaaaagcaattcggagatcatagcttcactgccatgggtgtatgggaaataagtcgttcgtgggactcacaactaaagggaaccggttccaatctgaacaatgaaagtgttgggtactggaatcttggcaatgctgctatcagagatgcgagcaattcatatacggaattttctttggcttccggcatcgtgcgtgctaattacgattataagaaacgatattttattactgctgcattaagagctgacggttcttctaaatttcagggagacaacaaatggggatatttcccttccgcagctgtggcttgggatattgcacaagaatctttcatgagcaaccagcacgtgctcgatcagctgaagctgcgtgccagctttggtgtcaccggaaatcaggatattgctgcttacagcacattaggtatgttgtcgggggcatcttacggctggggaacttccacttcctctacgggatattggggatatcagtttgctacacccggcattacctgggaaaaaacttaccaatatgatttgggattggatatgagtatcggaggctttaatattacagtggactggttcaagaaacaaacgaaagatctgctttttcagaaacaggtgcctaaatataacggaggtggtacttattgggtgaatcaaggaaaactgaacaataccggagtcgaattatcccttaccactttccctgtaaagggggctgtgacatgggaaaccagtctgaatgcttcttatgtgaagaatgaagtagcagacctcgcaggagatgactttgtactcactgctaactatagcgatttgggaggtcctctgcagattatgaagcccggttatcctatgggatctttctatgtttatcagtggaaaggattcgatgataaaggcgccaatctttatcagaaagcagatggtagtctgacaacgaatccgacttccgatgatctggtcgtgaaaggacaggcaagtcccaaatggacagtaggttggaataacactgttacttggaaaaactggacgctgaatgtctttttcaatgctgccacaggatatgaccggctgaatatcagtcgttttatggcggcatccatgactggagtctctcgttttattaccttgcgcgatgcctacttcaaaggctgggatcatgttgctaacaaagctgacgccctttatccgagtctcactaacaccgataacaagagttatgccaattcagatttttggcttgaagatgcttcttttattaagttgaagaatatcagtctctcgtaccgcattcctcgccgtgtattaaagtttgcaagtgtacaattgtctgtcagcgcacaggatctctttacgatcacccgctataaaggaatggatcccgaagtgtataccagttatgacggactggactatggcgcttatccgattccgcggacgattactttcggtgctaaaatcagattttaaaccacctattaagacaataaccgtatgaaaataacatatacctttataatgaaagttttgcctgctcttctggcagctttgtgttggacttcgtgtagtgatttcctggaagaagatccgaaaggacaattgccttcggatacctatttcagcaacaaggaagatttggatgcttcactgacggctctctattccgtgatagcaagttcacaggctagtaataacctttgtggtacgaacttcttggtgggagacgatatttccactcatccttcaagtaataagcagcctctccgtgagcatgatcagtttgatgtgaaagacaataactcgtggttgtccagtatgtgggaacagcgtttcaaagttatcaaggccgctaattttatcattaataatgcggagcgtacgccggaggtgtcgaaagaggatattaaggtggctattgcacaggcgcattattggagagcctactcttatttttatctggtgacgacttggggacgagttcccattatgctgaaagaagaaatagattataatgctcccttaaagacagaggaagaagtgtacgaactgatcctgtctgacctgaaaatagccgaaaccggttgtcccgcaatgtatacaaaagaaccttatgccagaaacggaatgaatattgccgtaagtgaaggagctgtgaaagcaacaatggcttatgtttatatgtgtatggcggggtggccgcttaataaaggagttgaatattataaactggctgccgctaaagccaaagaagtgatagacggtgcagataatggcacttattattataaactgctaccggaatatagtcaggtatattcgtgggagtacaataataagaatacggagctgctgttaggtatctactataacagggatgcgatggggcaggccgctcctttaactgatttccttcaggatatgaaacaggccggttggggagatacgaatggggaaatcaaattttggaagaactttcctgaaggccctcgtaaagatgctacgtatttccctaaaatcatgtttagcgacgggaaactatatgattggtggtatgataccgatcctgcttctcgtgaagtagtcgcccccgtctttatgaaaactgcagaaggagcggtgcgtggaacagaatttgattatacaaatcctaccgtagtcaatgcgtcgggtgagaaaacattccagttgttacgtctttcgcaagtatattgctggtatgccgaagcgacagggcgtgcgggagagatcaatgatcaggcggtcaaagttctaaacgaggtacgcaacagggcagatggtgaagatactgataaatatacgacggatatgtctcctgataaactggcggaagcggcttacgatgaacatggctgggaaatggcgggatactattggggaggaatcgccagcagagccagggatatgtttagaatgtaccgttataaggatcattttgaatcccgtaagctaaatgagcctattgaggtggcgcacgatgttttcaggaaagaagctgtagcagtcacaggaacttgggatgacagtaagatgtatgttccttatccttatgaagacgtgattttaaatccgaacctggataacagttggaaaaactgacagtatttagtatgacttattgaatgatctgttttttatagaacgatgtagattctcacaatggattacatcgttctttctttttgtatggcttgtggtatcaacctatatcattgttcgatagttaaactcttgtcttgtgtgcgaatagctgatttgaaaggggaatttaaaaacgtcgggctagatttcactaaatggaataaaagtgttatttttgcatcttgttcttaacggaaattaatcaagaaatgatagaagatattaaaaaagcctgtcaggtgatgaatgaaggaggagtgatcctttatcccaccgataccgtatggggtataggctgtgatgcgactaatgaagaggctgtacgccgcgtgtatgagattaagaagcgcgctgacagcaaggctatgctggtcttggtagactctccggttaaagtagatttttatgtacaggatgtgcctgatgttgcatgggatttgattgaagttgccgacaagccgttgacgattatttattccggagcacgtaacttagcatcgaatttgctggccgaggatggtagtgtagggattcgggtgacgaatgaagatttttccagacgactctgtcagcagttccgtaaagcaatcgtttctacttcggctaatgtcagcgggcagccgggtgcggctaattttagcgaaatcagtgatgaaatcaaatcggcggtagattatatcgttggctttcgccaggacgatatgagccggccgagaccctcaagtattattaagttggaaaaaggtggagtgataaagataattcgcgaataaatgaagggagaaaaacttagtttattacagcgttgcatcaaatggcgggaagcgaatataaaggagaagcaatttattctgatattaagtttcctggtcggaattttcacagcgtttgccgcattaatattgaaattctttatccatcagatacagaatttcctaactgataattttaatgcaacggaagctaactacctgtatttggtatatccggtagtcgggatttttcttgcaggttggtttgttcgtaacattgttaaggatgacatcagtcatggagtcaccaaaattctatatgctatttcccgtagacagggacgtatcaagcgacataatatctggtcctctaccattgccagtgcgatcaccatcgggtttggtggatcggttggagcagaggcgccgattgtactgacaggttcggcaatcggttccaatttagggagtgtattcaagatggagcaccgcacgctgatgttgctcgtcggctgtggcgcggcaggtgcgattgccggcatttttaaagctccgattgcgggattggtatttacattggaagtcttgatgatcgacttgaccatgtcctctttacttcccctgctgatttctgccgtgacagcggcaaccgtttcatatataatcaccggtacggaggctatgtttaagtttcatttagatcaggcattcgaactggaacgtattcctttcgttattttactgggaattttttgcggactgatttcattgtactttacgcgtgccatgaattcggtggaaggtgtctttggtaaactcaacaacccttataagaaactggctttcggtggtgtgatgttgagtatattgatcttccttttcccgcctctttatggtgaaggatatgataccattaatcttttgctgaatggaacgtctgcggcagagtgggatacggtcatgaacaattctatgttttatggttatggcaatttgctgctggtttatctgatgctgattattctgctgaaggtctttgcttccagtgcaacgaatggtggcggtggttgtggtggtatctttgcaccttcgctttatctgggatgtatcgccgggtttgtcttttctcattttagcaatgactttgctttctccgcttatttgccggaaaagaattttgcattgatgggaatggcgggagtgatgagtggcgttatgcatgctccgttgacaggagtgttcctgatcgctgaattgacagggggatatgatttatttcttccgttgatgattgtatctgtaagttcatatctgaccattatagctttcgaacctcatagtatctattcgatgcgtttagctaagaagggacagttgcttacacaccataaggataaagctgtgttgacgttgatgaagatggagaatgtggtggagaaagatttcgttgtcgtacatccggaaatggatttgggcgaattagtgaaagcaattgctgcttcccatcgaaatgtcttcccggtgacagataaaaaaacaggtgaattgttaggtattgtacttcttgacgacattcgtaacattatgttccggcaagaactttatcaccgtttcactgttaataaattaatgacatctgcccctgccaagatattcgatacggatggaatggagcaggtgatgcagacgtttgatgatacgaaagcctggaatcttccggtagtggatgaagaagggcgatatcagggatttgtttctaaatcgaagatatttaattcataccggcaagttttggtacatttctctgaagactaaccgacaatcggcaagatgccggagccggggttatgcagataacaggttgctatgcagattataagacgattatgaaaaaagaagatttaagaatagtatatatggggactcccgattttgcggtagaggccctgcgtcaattagtagaaggcggttataatgtagtgggtgtgattacaatgcccgataagcctgccggacgcggacataagattcagtattctcctgtaaagcaatatgcgcttgaacaaaatttaccgttacttcaaccggaaaggttaaaagatgaggtttttgtagaagcattgcgtgaatggaaggcggacttgcagattgtagttgcttttcgtatgttgccggaagtggtatggaatatgccacgactgggtacgttcaatcttcatgcttctttgcttcctcaataccgtggagctgcgcccattaattgggcggttatcaatggtgatacggaaacaggaattactactttctttttgaaacacgagatagacaccggagaagtcattcagcaagtacatgtacctattgcagatacggataatgtggaagtggtacatgataagttgatggtactgggaggaaaactggttcttgaaacggtagacgctatattgaatggaacggtaaaaccgattcctcaagaagaaatggcggttgtcggtgaacttcgtcctgctccgaagatctttaaagaaacctgtcggattgactggaatcagccggtgaagaagatatatgattttatccgtggattatcaccttatcctgctgcctggagtgaactgattacttctgaagaaggagcagcagtggtcgtgaagatatttgaaagcgagaagatttatgaatcacatcaattagctacaggaacaattgtgaccgatggaaaaaaattcatgaaagtagctgtaccggatggatttgtatctattctttctttacagcttcccggtaaaaaacgtctgaaaatagatgaattgcttcgtggatatcacctggaagatggttgtctgatgaagtaattaatcggatgagcagaataaaacgagcaagccattagattataaatagaataaaacgtcccgaataagagacggctagaacctaaaataaaagaattatgaaaccgattatcgctccttccattctttctgccgattttggatatttggcaaaggacattgaaatggtaaaccgcagtgaagcggagtgggtacatattgatattatggacggagtatttgttccgaacatttcatttggctttccggtactgaaatatgtggcgaagttaagccagaaaccgctggatgtgcatttgatgattgtgaatccggaaaagtttattccggaggtaaaagcgttgggcgctcatacgatgaatgtacattatgaagcttgcccgcatctgcatcgggtgattcaacaaatcagagaagctgggatgcagcctgctgtaactatcaatccagccactcctgtagctcttttacaagatattatccgggatgtatatatggtgcttatcatgagcgtgaatccgggatttggcggacagaagtttatcgaacattcagtagaaaaagttcgtgagctgcgtgccctgattgaacggacaggttcgaaagcgctcattgaagtagacggtggggtgaatctggaaacaggtgcccgcttggttgaggcgggagccgatgcgctggtggctggaaatgctgtctttgcggcacccgatccggaagcgatgattagtcagttgcacgaactgtaactcatcagttgagtactttttacatccatcgatatccctatatacgcctgattatcccttggataacaggcgttttttgtggagatcatttttttgaccgttcatgggaacttttttggagtattctagcccttggactttgtattgctttattatttgtgctttatttcctgaaacgccattctttgcgatggtgttttggattagcagtctctatcctttgttttataggaggatggcttggaataacttggcaattacaacacgctgtctactcttttccggaagaagaaacagtgtatcgggttttaataacggatgcacctcaagcgaaagaacatacctacctctgccagacattattaaaggaacgtcgtgatactgccggcacatatccgatagaacgtactgcaatcctttatctacagcaagattcggccgtcacccggttgaaaagtggagatgaactgctgatttctgcccgtatttctccccctctcaacaatcgcaactttgatgaatttgattatgcccgcttcctgatgcggaaaggaatcagtggaacaggatatgttgcatccgggaaatggacaaaacaggacggaatgaataaccttgatctcaaaagtatagccagctcttgccgaagaaagatgatttcactttatcagaaactagggttttccggcgatgaactggctgtactttcagcactgaccataggagacaaaacggaattaagtgattcggttcgtgaaagttattcggtggccggtgcaagtcatattctagctctatccggtttgcatatcgggcttttatatacattgctttttttcatactgaaacctattgcccgaagaggaaatataggtagagttatacgttctgttcttcttcttatcctattatgggcttttgcctttttcacaggactttctccttcggtagtacgctcggtcagtaagcgtctccgcgattctatcttgtcgcccttttttcattcttatatttttgcgatgtataaaaatgaagcattatggatttagcagaaaatcgatttggaaaaacttggaaacatttccttgaagtattgaaagtagactacaattgttctttagccgatgtttgccgcgatcagcataccacttttggtggtatgagttcctggatgtccagacggggctatagcgttaaacaagccaaggcagatgtggtccgtgattattatggcggcgttgaaccctcccaaccgacaacttcctctccttcattcactcaaatagcacccgccatgttgtcggaagaagagtttagtcttgccgggatcacaatcacctttaacagtggaaccaccatttcagtcaaacgggccacacccggtggtgtgattaaaatgttgcgcgattacgaaagaaaggagggagatccatgtattctctaacatcagccaatcgatactatctgtaccagggctttgttcgtatgaaccttggcattgacggtttattcaaaattatacgatcggaaatgaaggacttgtctcccgtttccggagatatctttttattctttggtaaaaaccgacaaagtgtaaaaatactgcgttgggatggcgatggctttcttctgtactacaagcgcctcgaaggtggaagttttgagttaccgacatttaaccccaatacaggcaattacgagatttcttatcaggttttgtcttttatcttaaatggagtgtcattaaagtctgtacggttgagaaaacgttttaggatctaattcaacattctgattattagacatttgcaataaagatatcatccggtttatttggctaattcgttgattttttatatctttatgccatgaaaaaggatgagatcatagagttattgaaggaacaaatcaagggattacgagatgacaacaacagactcttggaccaaatagatgctttgataaaggaggtttcttcccttaaagaggcactccttcaaaaaggcgaatctcttagcaagcaacagcgccttactaagggactcgccaaacttgtatccaacacatccgaacagcaacaggctccccaatctgccatatccgaagaagagcggcagaagatagaagcggaaaaagcagataagcgtaaagcaagaaagaacaatggggccaaacgtgacatgcattatgagatggaggaagaagaacatgtcgtttatcccgatgatcccgattttgacatcaataaggcccggttgtttaccactgttcccagaatatgcgtccgctatgaatgtgtacccatgcgcttcatcaagcatgtctacaagatacacacctatacacaagaaggtcgcctgtttgagggaaaaacaccggcctcggccttcttgaattccagctatgacggttcatttattgccggattgatggaattacgttatatacaatcgctacctgttgaaagaatcatcaactacttcgagagtcatggctttacgctgaagaaacctacggctcataagttgatagagaaagcctcaaacctcttcgaaaatctttataagtgcatccggcagacagctttgagtgatccttataaggcagccgatgaaacctattacaaaatactcgtcccggaaaagaacagcaagggaaaaggagtcaggaagggatacctttgggtggttgtcggcataaacaccaggatgatatacttgctctatgatgacggctcccggtctgaaagagttattcttaacgaattaggcagttgcaaaggtatcatacaaagtgatggttactcaccttaccggaagctcgaaagcgatgcttatcccaatatcacacgcatcccgtgcttgcaacatataaaacggaaatttatagattgcggtgagaaggacccggatgcaaaaaggatcgtggagctgataaacgcactttatcaaaacgagcataagcataaagttggggttgagggatggacggtagaacagaatcttatgcatcgaaaaaaatatgcgccggacatactcggagaaataaaagatgtgtttgatgaaatagaagaacggggggatttattacctaagagcgaactgcaggaagccattacctatcttcgcaatgagtggaatgcagtggtggacatctttaattatggtgacacttatctggacaacaatatggttgaacggatgaaccggtacatatccttatcaagaaaaaactcattgttcttcggcagccataagggggccgaacgaggcgccatactctatacgatagcactcacttgtaggatgcataaagtgaatctatttgagtatctcacggatgtgataaacagaacagccgaatggcaaccgaacacaccaattgaaaaatacagggaactgcttcctgacagatgggaaaaggctaatgactaaaaagggatcattagcctttttattttaatacactatatagaatcgcggagacgcttacctcggtcagtatgttttcgattttagcaatggcagatatggttggtcgccaaccgctatctttaaatacattggcggcagctgcatggttgatgttattctgcaatccggcatggttgtttgatgttggtttccagctctctttccttgctgttgcttccatcctattgattcaaaagccaatctatcacctgattacggtgaaaggtagaataggaaaatatatttggggactgataagtgtgtctgttgctgcacaaataggaacagctccgcttgtcatgttttatttctcccggttttctgtacattttctattgacgaacttggttgttattcctttcattacgattatcctgtatgctgctgtcattatgcttcttctgactcctctttcgtggcttcagatcgtagtggccgaaggtgttaagaaactattggaaggacttaatttcttcgtccgatgggtggaacagcttccttacgcttctatagatggaatctggctttatcagtcagaaatattgggtatctatatcgttggctttttgttaacctattatttcatgaaccgtcgataccggaatttattgatttgtctttttactatcttattactagggacttatcatgcaacattatattggctagatcgtccccggacaagtctggtcttctataacgtgcgcggttgccctgcagtacattgcattgagagcgatggacgttcctggataaactatgtagatactatccccaatgaaaaacgtctgaaacgcatggctgctaactattggaagcatcatcaccttctgcctcccaaagaaataactggcgattgccggtatatggtacttaatcgtcagcagcagattatatcctatcatggctgtcatatttgtgtaataaatgataaccattggcggaacaaaaccaccgtttctccgttatatattcagtatctttacttatgcaaaggatatgacggacatctggaagagctcacccgaatcttttctttctcttacgtcatattggacgcatctctctcggaataccgcagacacctccttgaaagcgaatgcaagcaatccggtctgcggtttatctcgctatccgacgaaggttctgtccgctttttgctctaagtacaaagatttatcgtacatttgcaccttgataaagtataagagtatgttgacgaaagtaattgaacaagccaaaatagaccattttaccaaatggtttgaacgagctgacaaaatagtaattgtatctcatgtttctcctgacggcgatgctatcggttcttcattgggattatatcattttttagattcacaagagaaaacagtaaacgtaattgtgccgaatgcttttcccgattttctgcggtggatgccgggcagtaaggatatcctgttgtatgaccgttacaaagactttgcagataaattgatcgccgaagcagacgtcatctgttgcctcgatttcaatgcactgaagcgtatcgacgatatggcagatgctgtggccgcttctccggcacgtaaaataatgatcgatcatcatttatatcccgaagatttctgtaagatagtaatgtcctatcccaaaatatcttctacttccgaactgatattccgtctcatctgccgtatgggatatttcagtgatatctctaaggaaggcgcagaatgtatctacacagggatgatgacagataccggtgggttcacctataactcgaacaaccgggagatttattttatcattagcgaactcctttctaaaggaatcgataaagatgatatttatcgtaaggtgtacaacacctattcggagagccgtttacgtttgatgggatatgtattatcgaacatgactgtgtattcggattataattcggctttaatcaccctgacaaaagcagagcaaagtaaattcaactatataaaaggcgatagcgaaggctttgttaatattcctctttccattaaaaatgtctgtttctcttgctttttgagggaagataccgagaaaccgatgattaaaatatcccttcgttcagtaggaaccttcccatgcaatcagttagctgccgaattcttccatggaggaggtcacttgaatgcttcaggcggtgaatttttcggaacgatggaagaggcaaaagcggtctttgaaaaggcgcttgagaaatatagacctttactaacagcgaaaagctaaagatggaaggttaaaagtgaatatggaaaggttaaaagatacgaactttcaacttccccctttcaacttttaatgattttgagatacatttgtgcggaatatagctaaataacagataatgaaaaaacttgtatttttatttctctctttgttaaccgccggaagtctgttccaggcatgcgacaattcgaagacttatgcagaaatgctggaagacgagaaaaatgcggtgaataagttcatcaaagataatgatattcgtgtcatttcattggaagagtttgaacgggatacgattacagcttctaaagaagcggggaatggatatgacgaatacgttgctttctccaatggcgtatatatgcagatcgtagatcgtggaggaaaagaggataagaatggagttgaagttattaatgaggtagatacttttgctaacaataatgtcatttgtacccgctatgtagaacaggatatgatgacaggagatactacatgtttcaatgttcctttggaaagatggatggatgttcctgattattataagtttccattaacattccgttatgtgcaaaacacgtctactgtttatggaatcgttttatccggtagtttggattacgatttattatggaatagtaaaggttatggaactgcaattccatccggatggctgattgccttaccttatttgcgtaataatgcgcatgtacgcctgattgtgccttctaagatgggacatacaactgcacaacaatatgtcaatccttatttctatgatatccggaagttcgagaaagcaaaaagctaaagcactaacattagataaatcaaatctttaactaaagaacctatgactctaatcaaatctatctctggaatccgcggaactatcggcggaggagcgggagaaggactgaacccgcttgacattgtaaaattcacctcggcttatgctactttgattcgtagaacctgcaaggcaaagagtaataagattgttgtgggacgtgatgcccgcatttccggtgaaatggtaaaaaacgtagtagtcggcacattgatgggaatgggctgggatgtagtagacattgatcttgcttctaccccgaccacagaacttgctgtaacaatggaaggcgcctgtggcggtattatcctgacagcttctcataacccgaaacagtggaacgcactgaaattgctgaatgaacatggtgaatttctgaatgcagccgaaggcaacgaagtacttcgtattgctgaagctgaagaatttgactatgccgatgtcgaccatctgggatcttaccgcaaagacctgacttataatcagaaacatatcgacagtgtattggctctcgacctggtagatgtagaagctatcaagaaagccaatttccgtgtagcgattgactgtgtgaactctgtaggcggtatcattctccctgaacttcttgaacgtttgggtgtgaaacatgtagaaaaactctactgtgaacctaccggcaatttccaacacaaccccgaaccgcttgaaaagaacctcggtgacatcatgaacttaatgaaaggtggaaaggccgatgtagcttttgttgtagaccccgatgttgaccgtctggcaatgatctgcgagaatggcgtaatgtacggtgaagaatatacactggttactgttgccgactatgtactgaaacatacccccggtaacactgtttctaatttgagctctactcgtgctttgcgtgatgtaactcgcaagtatggaatggaatacagcgcttctgccgtaggcgaagtaaatgttgtaacgaagatgaaagcaaccaatgccgttatcggcggtgagggaaatggtggagtaatttatcctgctagtcactacggacgtgatgcattggtaggcatcgcattattccttagccatctggctcacgaaggaaaaaaggttagcgagctccgtgctacttatcctccttacttcattgctaaaaaccgtgtagacttgactccggaaatcgatgtagatgctatccttgccaaagtgaaggaaatctataagaacgaagaaatcaacgatatcgacggtgtgaaaatagactttgccgacaaatgggtgcatttgcgcaagagtaatacagaaccgatcatccgtgtgtatagtgaagcttctactatggaagctgccgaggaaatcggtcagaagataatggatgtgattaatgaattagcaaaataatatcctgtaaaataggattttatttataacatttgagtctcgtatatcataaagataactgaataagttgtctcattgatatacgagactttttattaggatgatatccactgaataatgatagttactcttctccttgagtattaacaataaagtttcttttgattaagtctaaacttcctttcgtccaatagtaaacttctcttttgttatttacaaacttaaaatgcaagcttcatttttataaatgcaagttttgtttttaaaaacggaacctttgtttttataaatgaagcttgcatttatagattggaagggatgaaaagcaactttactgttaataaaaagaaagtttggacttaatcaagagcaacttttctattaatagattacatgagaagtaagcagtattgagaggaaactaatctatatagcttacttctctacttcgttagaatagatacgccacaagaatatcaattgatatacaaaactttataggtcttatatcaatgataaacacatggcttaattatacagaattgatatatgaaaagcacaattgagggaaaattgtagtatatttgtactgttctttgaggcgtctttattattaaggaagcgtttagtgctttttctcaagtgcgaatctggacaattcgagctgtgttgaggaaataaacaaaacgttcttcctttggtttgtatgttgcatctaggtactgatatacagtcaagggcgtgagctgtttttgcttgtatccaacacagaggtagttcagaacctgcacttggatataagtttagcggtctcgcgcttcttttgtgtatacacttctgttgagactaggaaggaactaataaattgaaaaacatacaaacagtacaagtgttgccagtaatgttgctaatgtccgtaacagtatcagcaagagacctaacaggttttgaacagcttattgataaacgtacgacatgaaaataaaactgattgcattatttataatgatgggatcgttggctgccgtagctgataatgatacttatttcttttcaaaagtagattatggttcagtgttcgttgttcaaacagccgatggattcttgtatcagataattttaattggcaggatttttttccggtgtggggtggtgagacggaggcaaagattggctgtttcgcggatgggaattggcaagaatgaaagaggcggaatccttggattgtgcgaattagtagtgaagtagttgctgaaaaatagaggtacttgataaaatagagttgcattttccgtataaaaacgtatctttgtgtaaagagaattaaagacatcgattattaatggctattttctttcgcactacgaaacagaacatataagcgattgcctgatatttaatagatgatattaatgattaacacaatgaaaatacgcttgattttgtcttttgttttattgatttattcattggtctgtcaagcagatggcggtaaagattcatatatcttccggaaagtagattatcagcaaggattatccaatagtgctgtgctttgtctttttcaagacaatacagggttgatgtggtttggtacatacgatggtgtcaattgttatgatggccgaaacatggaagtttttcgttctgatttttcagcccccaaagctttgagtaataatgtaatccattctattcagcaggcagataataattgtttgtggatttctacacatttgggtatcaatcgtctttcacaggattcgcggcaagttgtcggatattatgactttacagatgattattatctacattccaattctaaaggaaacacatgggtggtgagtcatggtggaattttctactataatacatcttataaacgatttgtacagattaagaatctgaaagtacccgtagaagatatggataaacgggcattcgtaacggatgatggtgttttgtggattttcactcaacaaacaggggagctgttacaggtttcgcaggatgcttttgattgtgacacattatcaattcattcaactgtttcatctactgattttcatgcgaaacctattgaagatgtcttttatcagaatggcgttctttgttttatcgatagtgagcatgatctttatgtttatgatatttcccgacaatctaaaatttatattcgtaacctttcttcattagtgcagaagaatggaactattgcaggaatagcccttttctatgaagatattattattggttttcgaacgaatgggttagtccgtctccgtacttcacaaaaatataaagaagaagtggtcgaccggaatgtacgtatatatagtatttatcgagatcctcatcagaatgtcttatgggttgcttcggacggacaaggaacgattatgtatgctaagaaatattctattgccaccaatttgatgctcaatcaactgtcatctaacttaagcaggcaggtacgttctgttatgacagacgatagtggtggactatggttcgggacgaaaggtgatggactgctgcatataccggattatcgtgagaatgaggaggcttctgccgttacagtttactctcctgaaggaaagcaaaatgttgtgtcttatatacgatggaataaagaatttcctgtttataaattggttcaaagccgttatatggatggcttttggataggatctggagatccgggactattttactattcttttgaagacaaagctttgcattctgtggagaatctgccggcacaacccaccgagatacatggcatttatgaggaaaatgatagtgtactttatgtggtgacagccggttccggttttcataaattaatacttgagaagcaggcaggtaccattcgtttcaagtcgcagaaaagttatcatttttttcacggtcagcgagaaattacgatgttctatccaatgttgcccgaaggggattctattttgtggcttggcagtcgggagaaaggactcgtacggtttgataagcggactgaagaatataaagtgatttctttgaaagaaatgcttcataagtcggtagacgatgtgctcagcctgtatcggaccaaagaagggttgttatatgtagggacaacatcaggattggtatgtttgaattctaatggcaaacagatgaaagctacctatatcggacgggagcaaggtttgctcaatgatatgattcatggtgtacttgaagatgagaacggactcttatggcttggtacgaatcgggggctgattaaatataatccgataaatggctcatcacatgcctacttttacagtgcaggtgttcaaatcggtgagtttagtgatgatgcttattacatgtgtccatatacacaggagctttttttcggtgggattgacgggttgctttatttggataaagaggtgcaggctgctccggaattttatccggatattttgttacgtaagttgactgttggacatacgcaagtggttcagggggatggagattactatacagacgatggtaaggcattacagttgaaggggacggaggtttcatttgcactttcttttgttgttccggattttttatcaggagaagatatagaatattcttaccagttggaaggatatgataaggattggacctcttttagtagtattaatgaagcctcatatacaggagtgccggcaggtgattatatctttaaggtacgctataagagggatgtatttgatacagaatatcggcatttttctattccggtatatatcctttctccctggtatcgatcggtggcggcttattttgtttatttgatcatttttttgttgttgttagggtacgtgatatatttgctacgtaaaaactaccttcaggaacggatgatgaaaacactgatggggacagaaagttgccggaaatccgagactgtatatacaaaccgtaggatgcttgaagattttactcttatttataattattgtgaccaattgcgtgcagagaatctttcttatgagcaatgtcttgagaaagtgtcactgatacgcgaaactgtgatgagcgcacttcttaatcctgacgctctgtttttggaagaacttaaacaattctttccggatcggtttattgtttctgcgcgtatgagtatacagggagtttctcaagaggtgttgcgtacgttggaagaacaagggattgatcattcttctatatcgtcaatgattccggaacacttaacatttccagtttacaagaatgcgttatacagtattctttattgctgctatctccggattactgaaatgaagggtactcatggcgtaatagtagaaatgtcagaacaggatggtaagatgcagctacatttttcttctaaagatgctactgcgaaagcgttgtatgaatatctttcagataaagcttcttcagtgacggagaaagattccgatcatgtgtttgttgtgcatttacttttaggttttgtacggtcagctttggaacgtattcatgccgttcttcgttatgatgatgatgagagtggtagtcggttgacgattatctttgaaccggcggtcttgacagtagcaggtgaacaagggaaaaaaactgtgcttttgttggaagacagagatgaaatgacttggttgattagtaatttcctggctgatgaatacgtggttcatcaagtaaagagtgtgcagcttgcttttgacgaaattcgtcggtcggctccggctctattattagtggatatgacaatgtatgccaatgctgaaagtacttttatggagtatgttagccggaatcgtactctgctttcaaagacagcttttattccattgttaacctggaaagttggttcggccattcagcgggaactgatcttgtggtctgattcttatattgtacttccttatgatatattattcttgcgggaagttgtccataatgctatttatggaaagcgggaagcgaagcagatatatatggaggaactgggagatttggcgggacagattgtctgtacaactaccgaacaagctgattttattcgtaaattgttaaaggtgattgaagaaaacctggacaaggaagaactgggctcaacgttgatcgctgatcgtatggcaatgagttcccgtcagttctatcgtaaattcaaggaaatttccaatactgctcccggtgatttaataaagagttaccgtatggaaaaggcagcccgcctgttacttgatgaagaactttctattcaagatgttattatggaggtcggtatttccagccggtcttatttttataaagagtttacccgtcggttcgggatgacaccgaaagattatcgggaacagcgaaaggtatgctgattgtcaggttaaattctttcgtataggtgattagttgggaaacattattatttatttgtttgtcacaaccttgtgctctaaattccttttgtcgattttattgtattgattattagtgtgttaatctgtgctctaatttaccattctgtgctttagatatgtgtctttattttgccgtttttttggcaaggtagagcattggacttttattcgaatagcctttatttgcaacaatctttttaaagggaattaaccttattactaatcaaatttaaaggaattatgaatgaaaaactaaagtatcttaccttatttgtaataggtatgatgttgagtttgggcatgaatgctcaatctgtaaaatcaatctccggtacggtaaccgatgatcagggagaggcggttatcagtggtacggtgaaagttaaaaacggtagtacaggaacaatcactgacattaacggtaaatacactctctctgttccttccaatgccaccttggtgttttcgtatattggttatatcacacaagaatttaaagtctcggaattaaagagtaatgttctgaacgtagttctgcaatcggatacgaaagcactggacgaagtagtcgttgtaggttatggtaccatgcgcaaatcagacttgacgggttccatttccacagccaaaggtaaagacatgctgaaagcacaatcattcaatgcgcttgacggattgaagggtaaagtggccggtgtgaatatcttctctaataccggtcagccgggtggagaatcacgtgtcatcattcgtggtatttctactatcaacgcgtcggcatcaccgctgtacgtagtagatggagtggtgatgtcaaacttcgaattgcttaatccgaatgatatcgaatctatcgaagtattgaaagatgcttcctctgctgccatctatggtgcccgtggtgcgaatggtgttatcatggtgactaccaagcgcggtaatgcaggaaaaggagtccatgtttcctatgatggttcattgtctatcggtaagatggctagaaaaatagatgtaatggatgctaacgaatggatgtctaccttcaagcagggattggaaaatgccaacgaatttcaaggcaagaacttcacaactgatctgtcacagatattcacagacgaacgtttgttcaatgcagacggttctccgaaatataataccaactggcaggatgaagcatcccgcactgccatctctcataaccatcagatcagtatccaacgtacaggagaaggatcttctatcggagcattcatcaattataccgatcaacagggtattttgttgaattcttacttcaaacgtatcaatgcaaaattggcgtatgatgacaaaccgactgattggctgtctacttccgttaatttattagtaaatcatacttggggtaatagaacttctgataacccttacggacaaggcgcattgcgtacgatgatcgaacagttgcctttcttaccggttaagctggatggtgaatatacgcagacgaacattattaatacaagctctattctcaataatcagactgatcctaatagcggaaaacaaggattcagcccggaaggtgtaggtaatcccgttgagttgctcgaacggatgcaggctatgcaatatcgtacgcagatttttggtaatgctgctttgactttccatctcatgaaaggattggatttgaagacccagttcggtatcgactaccacaataatcgtgatgctaactatacgccgttcactccgcgtccgatgattaatcaaagttccgagggagcagcttctgcaaataactccaactctttgtattggcaggaagaaacctatttgacttatgtgaaagatataaacaaacatcacattaatgcaatggcgggtatgtcttggcaagagtataattataccaaattcgaagcttccgacagtaagtatattgatgacttctacggatattataatttaggttccggaacgaaccgtccttctgtaggcaatgattacgacaagtgggcgatgaactcttatttcttgcgtctggcatattcttatgacaacaagtatatggctaccgtaaccggtcgttatgatggctcttccaaattcggacagaacaataaatatgcatttttcccgtcagtcggcttgggttggatgatttctaatgaagactttttgaaagataactcattgatcagcaagctgaaattacatacttcttacggtctgacaggtaattcggaaattggtacatataaatcattggctacggtgagccagtcgaatacgatcattggtgatgctctgcacgtagtgtcttatctggacaatatgcctaatccggacctgaaatgggaaaagacaggacagtgggacttaggattcgagttgggtttattcaataacagactgaatttcgatatttcctattattataagtatacttcggatttgttgctcgaccgtccggttcctgaatcaacaggttactcttccattatggataatattggagccgtttccaatcgtggtttagatattctggttacagcatatcctattcagacacatgatttccaatggacttccactcttaatttaggtttcaacaaaaatcgtgtagagaaactggatgaaagtgcatctgttgatcctgtcaccggtaagcgtcagattacaaccgatggttttgtgggttacgatatgttgatccgtgaaggtgaagagctttcttctttctatggttataagcgtgccggtatttacgatggtattccgtctaactgggatccggagacaatgaacataccttccactatcggtgaaaaggtaacttataagaaacgcgaaattatcggtaacggattacctgactggatgggctcatttatcaataccttcaattataaaggatttgatttgactttagactttcagtttacatggggggtagacgtgatgcaagaatattatcactctactgtagcccgtttcctaactaacggtatagaccgtctttataaggaagcatggcatccaactctcaatccgtcgggtaaagaacaggcaattcgtctgaataactttggtcagggagctaataaccaggcagatgatgactgggtttgcaatggttcttatttgcgttgtaacatgattcagctcggatataccttcaatccaacattgattaagaagatcggtctgtcttcattgcgtttgtatgcgaatgtgaataacgcgttcctgattacttctaaggactataacggatacgatccggataactcatctcgtttaggtgacaacaaatggggggctaaccgccaattcttcacctatccgcgtccgagaacgtttacgttcggtcttaatgtagcattttaattcaccgttataaaaactataagaattatgaaactattaaaagtatatatatctgcattttgtatgtgttcactttctgtgttgttgaattcatgcgacgatttcctgaaagaagaaccattggatatgaagtcatctgaccaattctggaagacgaaagctgatgcggagtcgggtgtgaacgcattgtatttcggtggtgtaccttatttacataacactgatgtaggcggtggctggactcctaaagcgacaatgtggggtggtattgtgtccggattgtacgttgataagcgtaaggatagaacatttactacggcatccgaagggtgtaacttcaatattgagtcttttgatgatattgcaatgaaatactggcatgagttttataaaggtatttcacgtgctaactttgttatagccaatattccgacaatgaccggggtgctggatgaagctactattaataattatgtggctcaaggtaaattcttccgtgcatacgggtatttttggctggtcaaagaatttggtggtgttccttatatttcagaaccttacacatctacagaaggtatgtacaaagaacgtctttctgctgaagaggtttataagaaaattgaagccgacttgctggatattgtcaacggggatgcattgccgaataaaacgttctatgaaaatggctgttatgttaccagagcaatggcgcagactttgctggcacaagtttatctacaatgggctggtgcaccgttaaacgggggggcagactattatggaaaagctgcacagatggcattgaaagtgattaatgatagtcctcacggacttattcatccgaatggaacgactgatgatttgaactctgcgtataatgtgattaagacaacgaaagaatcagctgaaatcatttatgctaaagaatacaattatagtgattatagtgtaggtaactcttatgcttgtcgttctatcgggacagatgcttttcagtggggagtgttccatccgggaggagacgtgctgtataatgcataccttccctgtgatatgttgcttaacagctatgcctctaatgatattcgaggacatgagaaacagttcttctttaagcaatataccgatgctgaaggaaatactcatactttgaataatgcaggcaactgggcatggtttgatgaaaatgctttgattagcggtcacgacggtgattataatatgccggtattccgttttgcggaagtcttgctgattgcggccgaaggtctggcacgtacaaatcatgaagataatgctgtcggtggagctaaatattatctcaatcaagtgcgtaaacgtgctggattggcagatgagacggctacaggaaacgatttaatacaatcgattttgactgaacgtttgcatgagttaccgttggaatttaagatttgggatgacattcgtcgtactcgtttgtatccggaagcatctaccgaatcaggaaaattgaaatggactgctcttgcatcggctcaaatccaaaacaagcccgatggaagcataagagccggcgccattcctgaatatgctttgttatggcctatcccgttagatgaaattcaggctaatcctgcgttggaaggacatcagaacccgggatggaattaattaggtaataataaatatttgtttctgatagaattggagagagggtaaaggctaattatcctctctctattgcttaaacggttagtctttcggttgtactctcattgtatacacataaatattatattttgattctcagttatttaacttgtactctcgttgacactcgtttcctttggttgactatactgctattttttcttattttggcgtatcagaggactgataattgctgaaagatgctttaatttgtaacataaataaaaaagacttgataatctagtattaatagtttaattcgtagaccatgaacaaaaagaaactactatctttcgcaatagccctgctattgggagtttcctctacctttgcacaaaagcaaccggtagactatgtgaatcctttaatggggactgattcgaaaatatcactatccaatggaaatacatatcccgccattgcgttgccttggggaatgaacttctggatgccacaaaccggaaagatgggtgacggttgggcttacacttatgcatccgacaaaatcagaggtttcaagcaaacgcatcagcccagtccgtggatcaatgactacggtcagttctcaatcatgccgatgactaaacagttgaagatcgatcaggacagtcgtgcttcctggttctctcataaggcagagaaagccactccttattattacagtgtttatttgtcagagtatgacatgacaactgaaatagctccgacagaacgttgcgcatatttccgtttcactttccctgaaacctccgatgcctatgtggtggtagatgctttcgaccgcggttcgtatgtgaaggtgattcccgaagaaaataaaatagttggttatacgacacgcaatagtggcggtgttcctcaaaactttaaaaattactttgtgatagagttcgacaagccttttactttcaataaagtatgggcagactatcatttggttgaaacacatctcgaactacaatccaatcacgtgggtgctgctatcggattttcaacgaagaaaggagaactggtacatgcaaaggtggcatcctcattcatcagtcctgaacaggctgaactgaacttgaaagaaattggtaataagacctttgaacagacaaaagaggccggtcgtaaggcatggaacaatgtcttggggcgtatcaaggttgaagacagcgatgagaaccgtatgcgtacgttctactcttgtttgtatcgttcggtgttgtttccccgtatgttttacgaagtaaacggtaagggagaaactgtgcattacagcccctataatggtgaaatccgtccgggatatatgtttaccgacactggattctgggatactttccgttgcttgtttccatttgttaatttgatatatccttcaatgggtgagaagatgcaggaaggcctgttgaatacctatcttgaaagtggattctttcctgaatgggcaagcccgggccatcgtggttgtatggttgggaacaattcagcttctgtagtggcggatgccttcatgaagaatgtaaccaaagcggatgcagaaaaaatgtacgaaggcctactgaaaggggccaatagcgtacatccgaaagtttctactaccggacgccgtggatatgaatattataacaaactgggctatgtgccatacgatgtgaaaattaatgagaatgcggcacgcacattggaatatgcatacgatgactggtgcatttaccgtatgggtgaaaaattaggccgtccggcagaagaactggatgtttataagaaaaggagtcagaactaccgtaatctgttcgatccggaaactaagttgatgcggggaaagaattccgacggaactttccagactcctttcaatccttttaaatggggagatgcctttacggaaggaaatagttggcattatacatggtcggtattccacgatgtacaaggactggttgacctgatgggcggcaagaagatgtttgtcagtatgcttgattctgtattcaatcttcctcctgtatttgatgatagctattatggaggagtgattcacgagattcgtgaaatggaaattgctaacatgggtaactatgcacatggcaaccaacctatccagcacatgatctacttgtataactatgccggcgaaccgtggaaagcccaatattggttgcgtgagacgatgaaccgcctctatcttcctactccggacggttattgtggagatgaagataacggtcagacttcggcttggtatgtatttactgcattgggattttatccggtatgtccgggcagcaatgaatatgtgatgggagctccttactttaagaaagcaacgattacactggagaacggcaagaaattggaaatctccgccccgaagaataacgatgataatcgttatattcgttcattgaattataatggcaagaattatacaaagaattatctgaaccatttcgatctgttgaaaggcggtcgtctggtgtttgatatggataacaaaccgaataagggaagaggtatcaacgaatcagacttcccgtattcattctctcgtgacgcaaagtaagctgatatgaataatttgagaaagaaagtattgatgatgactatggcggcagtaactttgtccgccatagctcaacagccggtagactatgtgaatccgattatcgggaccaatgggatggggcacacttttcccggtgcttgcactcctttcggatgggtacagttgagtccggacacagacacaattccgcataatataaatggagcttatcagaaaaatgcctacgagtattgtgctggttaccaatatagggacaagaccattgttggcttcagtcacactcatcttagtggtacgggacattctgacttgggagacatcttgttgatgcctgctgttggcgatgtgaagttaaatcccggtcgggcggattatccggaagagggataccgttcacgttttgaccatgctacagaaaaagctgttcccggatattatgaagtgatactggacgattatggcattaaggcccaactgacagcaacacaacggacgggtatacataaatataccttcccgaaaggaaaagatggtcatttgattttggatctggtgcatggtatttataattatgacggcaaagttctatgggccaatttgagagtcgaaaacgatactctgttgaccggatatcgtatcaccaatggatgggcgcgtacgaattatacctattttgctatctctttgtcacagccgattaaagactacggatataaggataaggaaaaagtattgtacaatggcttttggcgtcgttttaagttggaaaagaacttccccgaaatcacaggtcgaaaaatcgtggcttactttaacttcgataccgctaacaattcggaactggttgtaaaagtggcattgtcggcagtcagtacggaaggggccattaagaatctgcatgccgaggcttccggaaagagtttcgaacagttggcggaggctgctcgtacagattggaatagtgaactggagcatttcgagatcgaaggtacgcccgatcagaaagcaatgttctatacttctctttaccacaccatgattaatccgtctgtgtatatggatgtagacggttcctatcgtgggctggatcataacatacaccgggcggaaggattcaccaactatactatattttccctttgggatacctatcgtgcggaacatcctttcctgaatctggtgaaaccgggacgcaatgcggatatggtggaatccatgattaaacatgagcaacaaagcgtgcacggaatgttgccgatatggagtctgatgggaaatgaaaactggtgtatgagcggttatcatgctgtgtctgtactggcggatgcaataaccaaaggcgtcttttcgaatgtggatgaggcattggcggcaatggtcagtacatccaccgttccgtattatgaaggtatagctgattatatgaagctgggatatattccgcttgacaaaagtggtacagcagcctcttctactttggagtatgcatacgacgattggactatctatcagacagctttgaaggcaggtaacaaggaaatagcggagacttaccgaaagcgtgccctcaattatcgtactatctatgatacaagtattggttttgcacgtccccgttatagtgacggttctttcaagaaagagtttgatgtattgcaaacctatggtgaaggttttatcgaaggcaattcatggaatttctcttttcatgtgccacacgatgtatttggcatgatcgacttgatgggaggagaagggacgttcgtgcagaaactggatgaactgttctccatgcatctgccggagaagtactatgagcataatgaggatattacggaagaatgtttggtcggcggatatgtgcatggtaatgaaccgagccaccatgttccttatctatatgcgtggacttcccagccgtggaaatcacagtactggctgcgtgagattctgaataagatgtataagaatgatattaacggattgggtggaaatgatgattgcggacagatgtcagcatggtaccttttctccgtgatgggtttctatccggtttgtcctggtacagaccagtatgtattgggagcgccctacctaccttatctgaagatgacgcttcctaatggaaagacattggagatcaaagcgccgggtgtcagcgataagaaacgttacgtgcagtcgctgaaattgaacggtaaggtatacgacaagatgtacattacacatgaagacattttgaaaggaggcgtgcttgaattcaagatgggggcgtcacctaacaaacgtcgcggattatcaccggaggataaaccttattcattaactaacggaatcaacgaataatcaataaaggagtatgaaaaagatacatttaatctatgcagcctgcctgctggtaggtatgggggcttgtgctgcaagtgtgcaaaaacaggtgaaggatagttctgatgtatggaaagagtacaatacaggtgctgtattgtttgaggataaagcaccggaaacgctgggatcggacatttaccaccggatcattcccgatgctgaatcgtacatcaaggaacaggcacgtactgtattagctactctttacaattctccggaagatagtattcccgcagtgcacaagatacattatactttggaagatatcaacggtatttctgctaaaggcggtggcaatggtgatgtgacgattttctacagtacacgtcatattgaaaaatcttttgcagcgaatgatacggcaaagttgtttttcgaaacgcgcggggtattgttgcatgaactgacacatgcttatcagctggaaccgcaaggaatcggttcttatggaaccaatcgtgtgttctgggcatttatcgagggaatggcagatgctgtgcgggttgccaatggaggatttgacggaccgaatgcccgtccgaaaggtggaaattatatggacggataccgtacggcgggttatttcttcgtgtggttacgtgacaacaaagatcctgaattcctgcgtaagtttaaccggagtacattggaggttatcccttggtcgtttgatggagctatcaagcatgttttaggagacgaatataatattgatgaactgtggcatgaatatcaagttgcggtaggtgatatacaagcataataatgtaaatatggtgagtgtaatgggtaaaagaggattgtttttagtatggctgtgcctggtgaatattttgccgggcatggctcaaaccgagaaactgattgattatgtgaatccatttgtgggaacagatggttatggtaatgtgtatccgggtgcgcagattcctttcgggggaattcagatgagtccggacacggatagtaaatactatgatgcggcttccggttataaatataatcattccactttgttggggttcagtctgactcatttaagcgggactggtatacctgatttgggagacttcttgtttatttccggaacaggagagatgaaactggatccggggacacgtgaggagccggaaaagggataccgttcacgttattctcatgaaaaggaatgggcatcacctaattattatgcggtggaactgtcagattatggagtaaaggctgaaatgacgtcaggggtacgtagtggtatgttccgcttcacctatcctcaatcggataaagcttttattatgatcgatatgaaccatactttatggcaatcttgtgaatgggcgaatctgcgcatggaaaatgattctaccatcaccggatataaactggtgaaaggctggggaccggaacggcatatctatttcacggctactttctctaaaaagttgaccggcttgcgctttatgcagaataagaagccggtgatttacaatacctcccggtttcgtagcagctatgaagcttggggaaagaatctgatggcttgcatctcttttgatacaaaagccggagaggaggtgattgtaaaaactgctatttcatcggtcagcacaaacggggcaaaaaacaatatggcggaacttgccggactcactttcgatgacctgaaagctaaaggagaagcactatgggaaaaagaacttggaaaatatacccttactgccgaccgtaaaacgaaaagaacattctatacgtcggcttatcatgcggctttgcatccgttcatctttcaggatgcagacgggcagtttcgaggattagataaaaatatagagaaagccgaaggatttactaactatacggtattctctctttgggatacctaccgggctttgcatccctggttcaatctggttcaacaggaagtgaatgccgatattgccaattccatgctggctcattatgataaaagtgtggagaaaatgcttcctatctggtcgttttatggaaatgagacttggtgtatgattggttatcatgcagtttccgtattggctgacatgattgtgaagggagtgaaaggattcgattacgaacgtgcgtatgaggctatgaagaccacggcgatgaatccgaattatgactgtttgccggaatatcgtatgatgggatatgtgccttttgataaagaggcggagtcagtatctaaaacattggaatatgcgtatgatgattattgcatggcacaggctgccaaggctttgggtaaagaggatgattaccgttatttcttgaatcgtgcactctcttatcagactttgattgatccggaaacgaagtatatgcgtggcaaggacagtcagggaaactggcgtacaccgtttactccggtagcttatcagggacccggatctgtaaatggatggggggatattacggaaggatttactgtacaatatacctggtatgtaccacaagatgtacaaggatatatgaacgaagctggcgaagattggttccgcaaccggttggatgaactgttcacggtagagttgccggatgacattccgggagcacatgatattcaaggccgtatcggagcctattggcatggaaatgaaccttgccatcatgtagcgtatctttataattacttgaaagaaccttggaaatgtcagaagtgggtccgtacgattgttgaccgtttctatggcgatactccggatgcattaagtggcaatgacgattgcgggcagatgtcggcttggtatatgttcaattgcattggcttttacccggtggctccttcaagcaatatgtataacattggttctccttgcgttgaggcaataacagttcggatgagtaacggaaaagttattgaaatggtagcagataattggtcgccgaagaatgtgtatgtaaaggaattgtatgtaaatggcaagaagtatgacaaatcttatttgaaatatgaggatatacgtgatggcgtgaaactacgttttgtcatgagcagtaaaccgaactataagcgtgcggtatcggatgaagcggtagctccttctttgtcgttgcctggaaagacaatgaaatatcaggtaaatttgatgaaaacgggtatatcaaaccagtgaaaataacttttgaaggagtattacccagtccgtttgatagtacgaagtgatgtttttattacatttgccaatgtaaaacgattattaattaaatatctaaatcatgagaagatatttcctgttagttgtgtgtttgtgcttggcatcactacttcgtgcacagaataagttagagttaatttctcccaatggagagctgaaagtgtccttgaatctctcggataaaatctattatagtatagattataacggagatgtattgttgaaagacaatacccttcagttgacattgaagaatcaggtgttgggagaaaatcccaaactgcgccgtcagaaacgtacgagtgtcgacgagcaattaactcctattgttcctttgaaatatgcgaaagtcaataatcgttataatcaattgctactgacctttaaagattattcagtagaattccgtgcttttgacgatggagttgcttaccggtttattacctcacaaaaaggtgatgttgaagtaatgaacgaagagtttgctatcaacttcccgtcggattatcttcttcacttgcaacaaccgggaggcttccatacagcttatgaggaaccttacacacatgttcaaagtaatgcgtggaagcctgaagaacggatagctgttttgccggtattgattgacacacaaaaagactataaaatattaatcagcgagtcggatctggctgattatccatgtatgtttctcaaaggaacaggcacgaacggagcaatttctgtttttcctaaagctccgcttgcgtttgccgaaaacagtgatcgaagcgtgaagattactcaagaagctgattacattgctaaaacaaaaggtacgagaaattatccttggcgttactttgtgataagtaaaaatgataagcagttgattgagaatacaatgacttataaactggctgaaaagaatcaacttcaggatgtttcatggattaagccgggacaggtgagctgggaatggtggaatgacgcttctccttacggaccggatgtgaattttgtttccggttataacttggatacttataagtattacattgattttgcttctaaatttggtattccatatatcattatggatgaaggctgggctaaaagtacacgtgatccttatacgcctaatcccaaagtagacttgcacgagttgatccgttatggcaaagaaaaaaatgtagggattgtgctttggttgacgtggttgacggtagaaaacaattttgatctcttcaagactttcaatgaatggggagtaaaaggacttaagattgattttatggacagaagcgatcagtggatggtcaactattacgaacgggtagcccgggaagcagccaaacatcatttgtttgtcgattttcatggctctttcaaacctgccggactggaatataaatatccgaatgtattgtcttacgaaggagtgcgtggcatggaacaaatgggcggttgttatccggataatagtctgtatttaccgtttatgcgtaatgctgtcggtccgatggattatactcccggggcgatgattagtatgcagcctaatgtgtatcggtcggaacgtcctaatgctgcaagtatcggaacacgtgcttatcagttggcactctttgtggtttttgagagtggtctgcagatgttggcagataatcctactctttattatcgtaatgaagattgtacccgtttcatcacacaagttcccgtaacatgggacgagactgtggcattggaagctaaagcgggtgaatacgtcattgtagcaaaacggaaaggcgataagtggtttataggaggaatgactaataatggtaaaaaggaacgtgagtttaccataaagttagatttcttgaataaagatcgctcttatcaaatgatatcttttgaggatggtatcaacgcaggacgtcaggcgatggattatcgttgcaagtcagcccaagtgaaagccggagaacagctaactataaagatggttagaaatggcggctttgcagctgtcattgaatgatggcacatattctaactttccatacgtaaaaatggaatcctctttcaatctatcaccatccttctgaaacgcattgttcatcgagctttcagggtggtgatagattgttctccacctatcacctaatcattcatctatcaccgtttgaaatgaacatgcctgcatataaatataagcttgtatgtaaatagaagtttcaacaggagatacctttggtttcaagcgttgaaaccaatcgtttcacggcacgaaacactttgttttgctatttgttctaagaaggcaatgtctcggaatcaacgttttctcttagagaaccactctttaaactctgctactcgggctttactgacaagtattttttctttgattcctgaataatacaagttgatggacagtcggctgttgaaccataagtcaatatctttgatagcttctcgcgaaataagatattggcggttagctcgaaagaaaagagaaggattgagacactccgtaagttcatctaatgtttgagaaaaacagtattcggtttcatcggttaagactactttgacctgacagtccttaatataaaacaattgtatcatatctacagaaacgggcaatagtttgtctcctttggtaggaataaggaaatgacttttatagttttcttgcttttggagtgaatgtattagtttcagtagctcattctcctgttgtggaaaaggaaactggtgtttgtcagcagcatcctgtaaaccttggagcttatcgaaagcgtgttctatgtcttccttaccgatgggttttaataagtagtcgatgctgtttactttgaatgcacgtaacgcatattcatcataggcagttgtaaagataatcggacaagtaatattgatatgattgaatatctcgaaggcggaaccatctgccaggtgaatatccatgaataccagttccgacatcggataagaactgaaccattcgatagtggaactgatactatccagtatggtcacgatttctccattcggttttatttcattaagcagtgaagtcaggtttcgtactgctgctttttcgtcttctataatgacaatcttcatggtggttattgttctagttgtgatttttcaatcaaaggaatacaaactgtaaactctctgtcctccgttatttgtatatcccgtttaaacaagagcctgtatcgcttggcaaggttggcaagtccgataccggttccggaagttgcagtccatttgggctgaatgtcgttgctgatagacaaattgccgttatcgtccgtcgtgatatgaatggtcaacggcttccggttgctgatttcgttgtgctttactgcattctcaatcaacacttgcaccgccattggagggaggagatattcttcgtaggcattgcttatctgtatgtcgaattgtagattgttctcaaaacgcatctttaatagaaatatataagcggaaacaaattccatttcttcccggagactgacacattgtgactcattactttgcaaagtataccttagtacccgggagagttcctgaatgtaatcctgcgctttatcctgattttcgcgtaccagcgaacgcagggtattcagcgagttgaacagcatgtgtgggttcagctgattcttcagtacttcatactgattgcggagattctctgcctgaagctgttcgttctcaataagtaccagttgctgcttgaatataagatgaatgatacagcaactactggtgacgagacatgccacaataaaatcccgcaatggatgcaaataatgatgtaccatggcatcgatggccggaatatcaaatgttctgtgaaggaaaacaaaaaactgtcctgacaagttactcaatatccatgtcacgataaaggaaagcaaaatctttgtccctgtaattttaatggaagcctgattgaaatgaaacaaacgggtattgatggcaaaaagtaacaatagcgacagaaaggtaaaaagtatttcgtttgccacatctataaacttcatccccgggaataaggaatgactttcgaaacggtcgaaaagagatactgattcaggaaaatgaatcagtacagcaaccgctaaggagatgatgactgtggaaagtatatatttatctttttttattgctttggctatcatacaacaaagatagtggtaaattatgagttaccggttataaaatgtcaatgctgttgtcacagttggtcaattattgtttctgaatgtgtgccgtgacatacataccggggcggaattgtacattttcctccttgatggaagcatacacttcgagcgaacgattggtttcgtctactttttgtccgatggaaatcacgataccgtgaaaggtttgtgtccccattccgtttacacgaaactgtaccgggctgccgacttgtatgtctgcgagatctttctcgtaagtagtcaggcaaagcatcgggctgcttttatcgataagttcgcaaagtgcttctcccggattgatatatttgccgatattcatcgctacattagcggcataaccactaatgggggctttgacttccagtagcggttgtattccgttcttaagtaatgcctccgtttgaacgcctaaaagagaaagttgtgcagcagcggcgtcctggcgactcttcatggagagaaagtccgctttactttgctggaatttcttttgagaagctgcttgttcggcagacagatttttttgccgttcgtattcagctaagagatattcggtctgtgcgtggctgtccagataagtttgttgcagggtgatgaactccggattctctaacgtggcgattacactgtttacagccacccattgccctggaagcagagacgctttttttacaatgccccccatggttaaagcaatggttgcctgacgttgaggaggaagaacgattcgtccgttgaacgaaacctgattaggttttgaggtagctgaagtgatggcatccacttcgggttgtgcgatggtatctgctatcgtttcggtaacgggaattgcggcggattcgttatttgtagtttgctggtttcctttgcaagccgttagaactagtaaaaggatgggataaactatctttttcatatcttatgttttataataattattctgggtgatgtatgtcattcaatgtctcgatcttccacctacttgaaaagttcatattccagtgcagcaatattgtattggtagactgtttcaatatagcctctgcggatctctctggcggtggtaattgactgtatatattcggcaatgcctgtttcgctctgctgcaattgcaggttggctgcctttgtcagttcgtccgcttctttcaaggccgatgaggtataatatcgtaaactctcattatatctgcggagggatgcttccagttcgagtgtcttatttcttaactcccggatgttggcgtctgcctgtatttgcgctgaagtggcagttagccgtgcctgcttcactttgctcttttgtggtaggaagtagatggggaaagaaactccgatcatccaggcattcagattcttaagtgggagaatgtcctgacgtgtataccccacactgatttcaggaaagaaatggctctgctctacacggagcattgcttttgcttcatctgcctggctttgaaagtaggcagtatgtgctcccgataggtttccatccgaaatgccggtatagaataaggataaagtggaatctaccggaacaatgggatcgttggagtagcaactccattggaaacgtgccaatgccattttctcttcttcttttgcttggaaccagcggttatgcagatcggcagctatggtggtcatcatatttttctctagcaaggtgatctctccttgttggtatcgtaattctccgatgcgctgcagctcttctgccattttatcctgatcccgatacattgaacagagattagtggcatattgatagtaggcccacgcccttttcacttctgctgtgatttctttctctaccatctgccgataataggtgttcgtttttacctgacggttgactaacgcattcttgtagaatggcgttagaagggagcccagactttgctcgaaagccagttccttgtcttttttgttttctccgttaagttgaccccaggaatagctgaacgaggtaggcgttgcttctatcacttctccgcgagtggctttggcttgttgaatagcattattggctattttcaggcgaggatgattttgtttggctatttctatcgcctgttcgagactgactgtttgtgtctgttgagcggaaacgaacgcgggaagaaacaagaacaggagacacaatcccccgaaaggccagcgcagtttgattcccggacgtctccaggtagcaaatgaatttacaattttgtaaaacaccggaatgatgagtaaagtcagtacggtagaaataatcaagccaccgatgaccactgttgccaacggacgttgtacttctgcgccggctgaagtggctattgccatcgggacgaatcccagagatgcaaccagtcctgtcaggaatacaggacggagcaagtgtggagtccctcttttgataatctggtttgtagtcatggaataggtattttgtttacgaagttcgttgaagtgatttaccatcaggataccattcaatactgccaccccgaacaaagcgatgaatcctactccggccgatatgctaaacggaagtccgcgtagccaaagtgcggcgataccaccgatgagcgatagggggaccgttgagaataccatcagggtataggtgatgttcttgaatgcgaagaacagaatcaatagaatgagcattaatgctacggggatgaccaccagtaaggtattgatggcattttgcaagttttcgaactggccgccgtattcgaagtaatatcccggtttcagtttgatgttcttgttcagtgtctcttgaatattggcgacaacttgctggatgtctgcgtcacgcacattgaccccgatgacgatgcgccgtttggttgcatcccggttgatttgcagtggcccactgacaaggtcgatgcttgctacctctccaacagggatttgaattccttccgaagtgcgtacaaacaacttatcaagattcaagtcggccactttctcctggtcaagccgtaccacgagatcgaatctccgttcgttttcaaagactacacctgttgactctccggcataggcagttcggataatggtgttaagctcttgtatgttgatgccgtaacgggctattttgctacggttgtatttcactaccaattggggtaatcccatcgtctgctcaacgatgacatccgctgctcccggcactttttctacaaaggtagctgcttctttggctctttcatataattcgtgcgtgtcttctccatatagtttgatggcaatatctgcttttgctcccgtcatcagctcgttgaagcgaagctgtatcggttgcgagaagttgaattcggcacgttcagagagcggagcaagtgcatctttcattttatccaccatttctgcacggcttccggcacttgtccattctttgaatggtttcatgataatcatcacatcagcatcttccactgccatcgggtcagtgggaacttccgccgttcctattttggctacaacatgtttgatttcagggaatttatccattaatgctttctctgccaagcgggatacttcgatactttcggtcagcgaacttcctgcgggtagtgtcatttgcatggcaaaatctccttcgtccaaagtaggaatgaattctgctcccaggcgggtaaagagaaaaagtgaaccgatcagcgcagagaaggctacgatgacggtacgccatttgtgacgaagacaggcgcgcagggtgtgctggtagatcttgttcaatttctcgaagaagcggtcggcaagggtgggtttcacaataatggtatgcttcagaaagagggaggtcatcataggaacataagtcagtgaaagaattaaggctccgataatgcagaacacaagtgttttggccatgggggtgaagtatttcccttcaatcccgttcaatgtaaggatggggaagaagacgataaggataatcaacactgcaaaggtggcggaacgtgcaacgccggaagctcctttttccacttctttgtccatctctttgcgggtcagtgtgcggcctcggaattgttttccgtaaatgtgggcgaggataccttccaagataacgatagagccatctactacaataccaaagtcaatggcacctagactcattagattggcggtgacattgaatacacgcatcatgataaaagcgaagagcattgccagcgggatgacggatgctacaatcagtccggcacggaggttgccgaggaagaggatgagtacaaggaagacgataaccgctccttcaatcaggttgttgacaaccgtagagatgttccggtttaccagttccgaacggttcaagtaaggttctatactgactccttcgggtaatagctgctgtattttttctacccgtttttcgagttcttgagtcactacatttgcgttggcacctttcagcatcatggcaattccaccgacacactcgccctcaccatcctttgtcatggcaccgaaacgctttggagaaccgaagcggacaactcctacatcactgatatgtaccggaatcccattccggttggtcactacaatctgttcaatatccttgatgcgggtaatcataccttccgaccggatatagtaggcattctttattttctcaatgtaacttccgccggtattttggttgttgctgctaagtgcttcgaacacctcgccgatagtgatattcaaagaaaacagggcgtccgggtcgacggctacttcatattgtttcaggtaaccgccgaaactattgatttctactataccggggataccggacaactgacgtttcaccatccaatcttgaatggtgcggagttccattgcgtcatatttcttctcatatccgggagctaccttcaatatatactggtaaatttctcccagaccggtggtgatgggcatcatctccggtgttccgagctcggagggaatttcgcttgttacgctttgtatttgttcatttatcaactgccgtgcatcgagtgtggggacactttctttaaaaacgaccgttacgaccgatagcccgaagcggctgacagaacggatatcttcgacattcataatattgctcatcgctatttcgataggcatagtgatgagttgttccacctcttgtggcgcgagtgtaggagatacggtcactatttgtacctgattattggtaatgtcgggcacggcatcaataggtagtgtcagcatcgcatagatacctccgataaacaggaagagagtagtgagtcctacaaatagtttcttcttgattgaaaaacgtacaatagctgtaaacatgactttcgttgtattattatttcacgatacaaaattactacctatcttcatccgttatcactaagaataaatgaagcggaaagattgtggggtgaagtgacggatttgggaattgaaagatgtaaaatcatagttcttgtttcactgctgaacaaacatttctttcagtttactcgtttaatataaaaacaaactaaatgtatattcagcatgaaaacattcgtcttgatgatggtaagcctgttgtttgcaatttcttcggaagcgcaaaacaagtctttttatgattttacagtgaaaactattgatggtaaggacttttctctttcttcactgaaaggtaagaaagtgctggtagtcaacgtggcatctaagtgtgggctgacgccccagtatgctcaactggagaaactatatgagaaatataaagaaaaagactttgttattatcggttttccggcgaataactttatgggacaagaaccgggtagtaatgaggaaatagccaagttctgttctttgaactatgatattacttttccgatgatggctaagatttccgttaaaggaaaagatatggctcctctttaccaatggttgacggagaaaaaacagaatgggaaagaaaacgcaccggttcagtggaattttcagaagtttatgattgatgagaacggacattgggcgggagttgtgtctccgaaagaaagtccgttctctgaaaagattattacttggatagagaaggaataagagagacttttttcagctcttcttcgaagttgggagtgaagattcctttacccagattttcttttatttcttcgatcttccaaaatcgtccaccgtccagttcgtcgctgggatggatttcttcctcataaacggttttgtggacaaaaacaagctctttttcacggctggattcaaaaacataactggtgagaagctcgggggtgaagtctgtgatgcccaattcttcacggacttctctctttagggcgatttctacgctttcgcccaaatcaatatgtccgcccacagccgtatcccatttccccggttgaatatctttccattcgggtcgtttctgtaaatagatgtctccttgggtattgaatacgtgaaggtgaactaccggatgaagcagtttgctaccgctgtgacattctccgcgagtagcggctccggtgatatttccctgttcgtctacgatagggaacatttcctggttattatcgcttggcatagtgtcttttatattgggtgaaatcttacggagaggagaatatcttatggtattaataaagaagaatctccataacttaggaatcggaaatcatgcgccagtgcataatcataaattgtgtgccaattcccttttacaaaagctgaaaccaaaagcagcaaggtactttgcggctgatggaaattagtaaccatcgcttttactattttataattgtatcccggtgctatgataatctgtgtactggtgtgaagggtttccaaaccattcctgtcgagatatcctaatatcttttgcaacgcaacaacgggaggaatctggtcgtacttttcataaggctgccattgtttgacacgtagttcttcttccgtagcatacggattttcagccaatgtaactccaatgtgatacaggctttccagagtccgtacagaagtagtccctactgcaatagcacaaccgtcgtggtcaatcagttttttgatggtactccgattgaccgatatatattccgtgtgcatctcgtgaccttcgatttcttcactttttacaggtttgaatgtgcctgctcctacatgtagggttaattcttcaagatcaatccctttctcttgaagtgcatccaatactcgtggagtaaaatgtaatcccgccgtaggcgcagctaccgaacctttaatcttagaataaacagtctgataagtctccttgtcactttcttccgtatcccggtttaagtaaggaggaataggaagttctccgaatacttcaaggatatcggcaaacgtcacttccggattatcccatgcaaaatctacccaatggctggttcctttacattctcctcgggtagcggtcagagtaatagggaatcctttgacggtcatttcccgtttcaactgtccgtctttccatttcttcagattgccgatcatgcaaagccaggcggcatgtgctgtctgttggaaattcaagacataatcgtttggctggatcggttcaagacaaaacacttcgatcagtgctcccgtctcttttcgaaaatggaggcgtgcctgaatgacttttgtattattgaatatcatcagactgccttgcagcagatattccggcaaagaagtgaaaacatcttcactaacttctccacgacggtatattaagagtttggactggtcgcgggtaggcaacgggaatttagcaatacgttcatccggaagaggataactgtattcactgatatggatatgtctaggatcttctttcattgttttctaaaataaaaagaggttagaacccattcggtttctaacctctttaaccagtcggggtgactggattcgaaccagcgaccacacgccccccagacgcgtactctaaccgggctgagctacaccccgaattgcggatgcaaaagtacagattaatttttaattagcaaataatccgttgatttttctagtatgaattgtgccgatttatagctattattctgattattagtctttcttgtgattatacaaatctttatttcaatgagttagtagtttttttgattgcctcttatgtgatataaaagtacatttctttaattttgcttgaattagaaaacaatctgcttatttttcatttgaaagcattaatccttttcttgtcctaaaaacactataaaaaacaggccagtctataataaaacgaaataggaaaatgataaatgaactaacaatcagagagtttgtttataaattaatgtaaataaaaggtgtttgacttccttagtatgatactatatttccatttttggtgcgtggtaaattaggaagttatacatttgtaaaaagacttagtttagaaaggtgttaaatgttagacattaaaaatagagagacattagagatatacgtcctgggtgacgattttaaattttatcaaaatctgaagtatcttcctttgacttcttatccttctaataatcaatcagctttgattatatattgtttaggtggaaaggccaaaattacagtgcatgaagatgtacattggatacaaccggaggaattgattatattattacccggacaatttgtctcatttagtgagccaagtgaagatttctcgaccgttacgatggttatatctacttcactgtttagtgatgcgttaagtggtgtgcccagattttctccgcatttctttttctacatgcggactcattactggtatccgcagacggaacgcgatattccccggatgtataattatctgggtatgataaaagataaagttacctctcaagatatatataggcgtgagctgattattcatttgttgaggtatctgtatctggaactgttcaatgcttatcaaaaggaatcgaccttgatgactgcccgcagggatacccgtaaagaagagttggctaataaattctttgggcttatcatgaagcattttaaggagaataaggatgtggctttttatgcggataaactgtgtattacttccaaatacctgactatggtaattaaggagacaagcgggaagtctgctaaagactggattgttgaatacatcatattagaaatcaaggctttgttgaaaaacacaagcctgaacattcaggaaatagcgattaaaacgaactttgcgaatcaatcgtcgcttggacgtttttttagaaagcatacaggaatgtcgctttcacaatatcgaatgagtaacttagaacaatagtgcggacaattgcctcacaataggcaataatatctatagggattgggaagagaaagggaatgaagtctatttcattcccttttactatgtggtatatctgatgtaggatggattaaattcccatacattcgcgatagaagtcgagcatttcgaagatagtgtccttatcggcagtctgattgatgcaaatgtctccaatatcttttagtaaggtgaaattgatagtacctgaagtattctttttatcatgcgtcataaatgcatacagttggtcatatttcttgcagtcgaaagtaaatacaccataattatccttgataaactggatcgtttgccgcattttctctttcgggaaacctactttgagatgagaaagatacagttcgcacacaattccccaagctactgcatatccatgtaatacaggacggttttctgccagtgccatactttcgaacgcatgtcctacggtgtgtcccagatttaatgctttgcggattccatgttcgaagggatcctgttctacaatatcttctttcacttgtaccgattgacctaccaattgtttgagagctgcataatcaatactagaggaatcgaaattgagcaattctgcccaatgtgccgtattgctaatcaaaccgtgcttcaacatttcagcatatccggagaagaaattgtgtgtgtccaatgtgcgtaggaattcagtttcaatcaatacactgtttgccggagcgaaagcaccgatttcatttttcagtccgttgaagttgattcctgttttaccccccactgatgcgtccaccatagcgagcagagtggttggtatattgatataggaaatgccccgtttgaatgtagctgcggcaaaacctccgagatctgtcaccatccctcctccaagattgataagtaaagagtggcgggtagccccttgagtacttaatgccatccagacggaagcgagtgtttccagagttttatgcacatcttctgctccgatacagatttctacagcatcttttaacagatccgattcctttagagaagggagacaaagacgctgggtatgctcgtctgtgaggacgaataatttgtcatgcggacatagctcaatggcacgaccgaggctcgtttccaagctttcgcagagaataacttcttgtttactcatgattcttttgcttttttactctgcaaatgtatataaaatatctttttttacttacttttgtctcattaaaacgtttaatcatgaaagcattattacctgtatattgtcgtcctttaggatatgttgtcttgttggtagctctgttcatcccttttattttggtgatgcagggagtagtaactgatactaacttgctgttttataaagaatgtacaaagttgttgatgatggcaggatgcttgttaataatctttgcattgagtaagaatgaaagccgtgaaacggagcaaatccggaattcggctgttcgtaatgctatctttttgacattcttgttcgtctttggtggtatgttgtggcgtgttatgcaaggagatgtgataaacgtcgatacttcctctttccttacttttctggtttttaatgtgctttgtctggagtttggtctgaaaaaagcgcttgttgatcgattctttaaaagataattttcttttcaattaaaccttttacgattcgatttgtcaaaaagacattgttattgctactaatataatcgtaaataaggtaaatgaaaagattttcagcagggttggtgctgatgttgctatgcaccttctcaatttttgcacagaataaggttattaccgtttcgggacgtgtggtggaatccgatactaaagagcccgcagcgcaggctacagttcaattgctatcattacctgatagtgcttatgccgccggtatagccagtagtaaccaaggatggtttactctccccaaagtaaaagccggaaaatatgtgttgaaagtttcctatattggattccgaaccaagctcgtaccggtacaattatctgctaacgccactgataaaaaattgggaaccattacattggatccggatgctgtcatgctgaaggaagcggtgattactgccgaagctccgcaggtggtcgtgaaagaagatacgctggaatataactcaacagcttaccgtactcccgaaggggcgatgctcgaagagttggtgaagaaacttccgggagcagaaatagacgatgacggtaacgtcaaaatcaatggtaaagaagtaaagaagattatggtggatggtaaagagttctttggcggtgatgtgaaaaccggattgaagaacttaccggtcaacatgatcgacaaactgaagacgtacgataaaaagtctgatttggcacgtgttaccggaatagatgacggagaagaagaaactgttcttgacctgaaagtgaagaaaggtatgaatcaaggttggtttggtaatgcaagtgttgccggtggtacagaagatcgttacggaagcaacttgatgttgaatcgttttgtcgataatagccaattctctttaatcggttctgctaataatgtgaacgatcagggattctccggtggaggtggcggacctcgtttccggaacagcaatggtttgactgctaccaagatgttaggggctaactttgctacccagactgaaaaattggaactgggaggtagtgcccgttataatttcagtgatcgggatgcaacatctacaaactactcggaacgtttcctgcaaaatggaaattcttattcaaattcgaacagtaaaggccgcaataagaatacgaactttaatgcagactttcggttagagtggaaaccggacacattgacaaatatcattttccgtccgaacgtttcttatggaaagtctaatagttattctatttccgaatcgggaacttttaatggagatccatttaatttggtgtctaatcctaatgagtttttgaataagattttctggggaagtacggatgatcctttagaagctattcgtgtcaacgccagtaatagtgaatcaaaatctgaagggcagaatctctctgcaaatgcttctttgcaagtgaatcgtagattgaataatcagggacgaaacatcactttccgtggtacatttagttatggagataatgacagcgaacagtttagtgaatcattgacgcgttattttgatgataatgcaaaaaaagaagatgatgagcgtaaacaatatactacttctccaaccaagaattatgattatactgccgaactgacttatagcgaaccgattgcgagagctaccttcttacagttccgctataaatttcaatataaatatagtgaaagtgacagaagtacatacagcttgattcctgatgccgataaaggacaggattggttttggaattttggtgatggcctgcctgtaggatatgaagagaataaagatagagatttgagtaagtatgctcaatataaatattataaccatgatattaatgcaggactaaatattatccgcgagaaatatagattgaactttggagtatctttgcaaccgcagaacaccagattggattataagaaggccgaagtagatactgtggtaaaaagaaatgtgttcaattttgctcctaacgttgattttcgttacagattttctaaagtcagccagttgcgctttacctatcggggacgtgcaagccagccgagtatggaaaatttgcttgatgtaactgatgactctaatccgttgaatatccgtaagggtaatccgggattgaaaccttctttctctcattctatgcgtttgttttataatacttataatgcagataaacagcgtggcatgatggctcatgcaaacttgaatatgactcaaaatggcattactaatgccactacttataatcagagtactggtggagtgactgttaaaccggagaatatcaacggaaactggaatgcgatgggaatgtttggattcaatacagcattgagagacaagcggtttaccataaattctttttcccgtgctaattataccaatgcggtttcttatctttttaatgacgatactaaaataaatgacaagaacactagtacgacactgactttcggagagaatttgaatggaactttccgtaacgactggtttgaatttaccttgaatggttcaatcaactataactttgagcgaaatcaactgcgtccggaaaacaatcaagaaccctatacatttggttatggtgcaagtactaatatctctttaccttggagtatgacgttgtctaccaatatcactaataacgctcgtcgtggttatcgtgatgccagtatgaataagaatgaacttatttggaatgcacagattgcccaaaacttcctgaaaggcaatgccgcaaccatcagttttgaagtatatgatattctgcggcagcaatctaatatcagccgttcgttaacagccgatatgcgttctgtttctgaatataacggaattaatagctactgcatgcttcgtttctcttatcgtctgaatgtttttggaaataaagaagctcgcggcaatatgcgtcatggcggttttgatggtggtggacctcgtggcccgcgtggtggctttggaggtggcagaccacactaaagcagagtaataggtttaaataaaaacaggaagtcccggcacaacgattcaatgttgttgccgggacttctttgttaatccgagaatttactctatatttgttgtttagtatccgtatgaaaggagattcctatgattgattggaactatatgcttagccagatagcaacagtggcttttgatattctttattttggagccattatcggtacgattgtcatcatcattcttgacaaccggaatccggttaaaaccatggcatggatactcatattacttttccttcctattgtcggacttgtcttttattttttctttgggcggagtcaacgtcgcgaacgtatcattgggcaaaaaagctacgaccgcttattgaagaaaccaatggccgaatatctcgcacaggattgttcggacgttccttatgaatactcccgtcttattcagcttttccagcaaacgaatcaagcgtttccatttgaggggaaccgtgtggcagtctataccgaaggatataccaaacttcaatcattgttgcgtgaactgcaaaaagcgaagcagcatatccacatggaatattacatctttgaagatgacgctatcgggcgtatggtcagggatgtgctgatagaaaaagcttctcacggggttgaagtacgggttatctatgatgatgtaggttgctggcatgtgcctaaccgtttttttgaagaaatgcgcaatgccggtattgaagtcaggagctttttgaaagtacgttttcccttatttaccagtagggtgaattaccgcaaccatagaaagattgtcgttattgacggacgcgtgggcttcgttgggggaatgaacctggcagaacgttatatgcgtggcttttcttgggggatttggcgagatacgcatatcatgttggaaggcaaggcagtgcatggtttacaaacggcttttttgcttgattggtattttgtagaccgtacgttgataaccgcttcccgttattttccgaagattgactcttgcggaagttctttagtgcaaattgtcacgagtgagcctatcgggccatggaaagaaatcatgcagggattgactgttgccattaccagtgcaaaaaaatatttctatatgcaaacaccttattttttgcctacagaaccaatattagcagctatgcaaacagcagcattgtctggggtggatatacgcttgatgttaccggaacgtgcagataactggataactcatcttggatcgcgttcttatttggcagatgtgatgcaggcaggtgttaaggtctatttttataagaaaggttttctacattctaagctgatggtttcagatgatatgctttccactgtaggctctaccaatgttgacttccgtagctttgagcataactttgaggtgaatgcttttatgtatgacgtagaaactgcccttgaaatgaaagaaatatttcttcaggaccagcgcgaaagtacacagatctttttgaagaattggggcagacgttcgtggagacaaaaagctgtggagtctatcgtgcgtttattggctccgctactttaataaggatgaaattgtatttggatcttatctgaatagtgagaagttcacacttccatacacccttctctcaaggaaatgtggattttcttcgaaattattatcttttccatgctccagtaccaataatcctccttctttgagaagattattctgaaagattaattcgggtattgtttccaactcttttaaagcgtagggaggatcggcaaagatgaagtcgaactgttcgcggccatttttgataaacttgaatacatctccgcgtatcggcagacatttgtctgtctgcacctctttcataattttgcagatgaatgagtgatgtgcaggatctttctcaatgctgataacacggtcgcatccgcgggataccaattcgatactgatgcttcccgttccggcaaacaaatcaagagctgttattccttcttcaaaatcgatatagttattgagtacattaaacagattttctttggcgaaatctgtcgtagggcgtgctttaaatgtccgaggcacgtcaaatcttcttcgtttgtaaataccgctgattactcgcatgttaataaggcttgcatgtcaatattagttgcaggattcatgatgaatacctgtaggataaactttttcaattcactcattaaaacgtctttctccggaagtattccggttaggtgtaactcatcccgttcctgattaaactccagttgtttccaggcgtacaataaatagtaaatacggtcttctgtgtgcgtacattcaaaggaattagccagaagcagatgtcctcgttcaaaacaatagatgtcaatgccgtctttgcgtatagaagcatacatcttcttactgtttcccaatctgctttttacagaaaaataatcgatgaatggagtagattgagaatagaaacgagcttcgggatattgttcattcaaaaaggtctgtgcgcttttgtctatgccgaagatgacagctacattattctttcttagaatattatagagcaccgtttcgttttcttttttctgatgattatgataaaacagaagttccgcctgttcctcttcaaacaattctaatggcgcaatcgtaaaacgcttgcctgccatcataatgtttactcgtttgtaaggatgattgaggaaatccgattcgtgaaagagtgtttttagatttgctgtaagggatgaagacgcatttatctctttctctattattgaaagcgaatcgtcatgaatcgggttatagatagaaaaagaaaatccatccgtactaagacggatggataaagtatattgttttgatttagtaaaatcaatcattattcccagttaccagcaccattgtttggagtatcgatagaacctaccatcaagccgctatatttgcctagtttagaatccaggtcttttaggttgatgatttcttgtttgtcaagtccgctcaaataagtttcgtatggagctttcacttcgaacaaatataccggagcaccagacttggcagtgtcatttttcacgttcatttcgaattgagcaccatttccgtgaggaatatatttcatagagtcggcattgaatcctttgggatagatagtatccaatacagctacccacatagtgtcacgtttgaagttttcaagtccccatttcttaacttcatcgtatctaccggttttctttgctttttcgatgatagccatggctttcttttcagtcagtccatcttccaattgcttgtcagttaacattcccatcttcataacgaacggcaatttttgatttttaacgaaatcaatcagtgtgtctaatttgggtgcatacattccgcggtgcagcgaacggtattcctgctgtgccttacggatgtcgatcaaacgggcaatgactgctttttctctttctttttttgcgttttcaaaattgataggacccataatgctggtgtaacagatgtaaatcagtgcagcagcacaaagcaccaatacaatattaaatactgttttcatgataaattatgtttttagttgttatattcgcatcgcaaaaatagaataaataaatttaaatacgatagttcctcgaacttttttctcgtacaaaaatgataaataactatttagaaaggcaaattaaggaaaattttccttatcagccaactttagagcaggaaattgctgtaaaatctctttcagagtttctgctgtccacactggcagatgaagtctttatcttaagagggtatgctggtactggtaaaacatcgttggtaggggcattggtgaaaacgatggatcagctgcagcagaaatctgtattgttggctcctacaggacgtgcggcaaaagttttttcagtgtatgcaggacatccggcttttactattcataaaaaaatatatagacaacaatctttttctaatgaacttagtaacttttcgatcaatgacaatttagctaccaatacattgtttattgtcgacgaggcttccatgatttcaaacgaaggactgtcgggcagtatgtttggaacaggacgtttattggatgatttggtgcaatttgtttattcaggacagggatgtcgtctcttgttaatgggtgataccgcgcagcttcctccggtaggagaggagttaagcccggcacttttttccgatgcattgaaggggtatggacttgaagtacgtgagattgatcttactcaagtagtccgtcaggtgcaagaatccggaatattatggaatgccacacagttgaggcaattgatagcagaggatgattgttattctctgcctaagataaaaatagcaggttttcctgatattaaactggtgccgggaactgaactgatagaggaactaactaattgctacgatcatgatggtatggatgagacgattgttgtctgtcgttccaataaacgtgcaaacctatataacaatggaatacgtgctcaaattctttggcgtgaagatgaattgaatacaggagatatgttgatgatagccaaaaataattactattggacggagaaatataaggagatggattttatagctaatggagaaattgcagttgtccggcgtgttcgtcgaactcgtgaaatatatggttttcgttttgccgaagttactctccgctttcctgatcagaatgattttgaattggatgcgaatctattattagacactttacattcggactcacctgcattgccgaaagaagacaatgaccgattgttctatacggtacttgaggattatatagatattccaaacaaaagagaccggatgaaaaagatgaaagccgatccgcattacaatgctttgcaggtgaaatatgcatacgcaataacctgtcataaagcgcaaggcggacagtggcagaatgtgtttttagatcaggggtatatgacagatgagtatttgactccggattatttccggtggttgtatacagcttttactcgggcgacaaagacactgtatttggtgaattacccgaaagagcaggtggaatagttttgttttttgaatgactcttaatctttatatgatttagagttttaaggttacattgattatataatcagttgatttcaatattgttggattcaaaaaggtctttgagtactggttgtggtttgtttatagatgaaaagagtattttaagataagagctagcattagataaaaatagatagcaataatccctttatttgactctattcacagatttggaaagagtaaataaagggattctctataaattatttctctatatattaattatttgtaaacaatagtagttgcatcattcttagttaactttggtatcacttgaccagtctttaaataaagagtcttaattttgctgctacgattggcgtttaagtttgttaatgctggacattccgaagcatcaattgacgtaacataatcataacttgcataccaggaaacaagacttaaatccaaagactcaagtttactactgatgactttaagactttctgcctccgaataaacatagctacctcctgcattgaaactagtaattggattatctcccaaattatactcttcacaaatagtagggctattaaatgtgagtgatgataccttatgtaaacctgaaatatcaagctttttcatgtttgaacaataacctaaacgtaatgaagtcaggttagggaaatactctattccggttaaatctttaatctggttagagtatgaggtgttagagaatgaagttgcgtttaatccttcttcaagaataatacatttggtatcatcaatagggagagcccaaccgttagatatacaaagtgctcgaagaacggcatctggaatttccacagggctggcgtccggatctttttgaacaatagcaatatcttttactaatgtaccactggtttgggcaatatgaattgtacctccacgcgaagctggtgatgcggatagtttataagtaacagtaaccgtagtcaaaccatcatcgcctttttgtggttcggaaattgattgatcagtaatccaatctttcccttttgttatggaaatagcgtaattgacgttgtatttcactttaaaagagatagttcgtgctgttagatcatatgttaaagtgttactttcggtgataattgcatctgtttgtttttgattaatatctacattgacactttcagtaacgagtgggcttgagattgtaatttttgtactacgatctttatatgtcttgttctcggcagcagtgaatgataaagttactttgccaccgaattcattacgtctatcgaatgtcagccactctttaccaccgtcactatatgttatcgttgggtcggccacattggtattaagttgaattctcacagtacttttttctttagtaatagaaagagcttcgtcagaaagtaaatccattatatatgcaggttgagactctacttgtagtggcacaactgaagaacctgtgaaaaacttgaaggttgcagtacgcttttcatctaatttgttaggatcgatggtaaaagtaactacatcaccatctttacctgaagttattgacggatgtgcccaatcacatattcctgacaaccgccagttatcggagcttgttacagtaactgtagcatcccctccatttttatccacttggagtatattggtcgatagtgagattgttgaattaccattattgattgattcatcatcatcagaacaaccccatagtaggagggataccgataacactatcattaaattcttaaataatttcatatctattctttttaaggtaaaatatacattaatcagttaatagcttcacgttctgtactattctttttataatagtaacttggataaactaatgtttcatcgtacaaacctttacaaacggattggcatctatatacttgtgaaccatataatgatgggtcaagtgcgaagaacatgtagtatccataaccagcttcttttctagaacgcgctgtagattcacttgagttgccactgcctcgtcttagttctattgacataccagcacactgtttcaatgtcataccggtacctggcccagcagccccaccatagtcagctacagcataatcgcaatactgaccaggttcgataccatcgataacttggagactacttgaatacatgttgccaaggttatagagcgagacaattttttccggcatgacagctttacattcatacattaatcgtgaacctgcataagctgatgggcttgcaagccaggggtttgaaaggtctggtgagttcgaatattcgtcatcgaaagcgacgccgtccagattataagcacggcaataagctgccagttcccgggcgaattccctagctcccatatccgaaagttgagcgacaccagcttcgtcatgattaccaaggatgctgataataattttcataccagctttacgcaatggttgtagatacttatcattattgtcgagcaagaattgaacattttcattgttcgctaaatatactcgttgtttctctggatcccaattgatattagcagcaaaaagtacgatatggtcgaaaaaatatttaccactttcagtcagaaactcaagggcattgagcgggttagtatcattaacttcgaaataaagaactgtttgtaccgcatcttctcctttgttagtattaggtttgttgcgataatcttgaacgagaagcaccatatgcttggacgtttcagtaaatgttactccttcagtagaagatgttactgtcaaaggtactatgtaggttttatcctcttccattccatcaaacgcagtcagtgtaactttcacgcttggggtaactttatcatctggggcaagtacaaaagtaccattatttgcgattttcacattagcggcaggaaacacttcgaaatccgtttcatggatagtgttgtatatagctgcatatgattcctcgacagctatttgaacatctactcctttttgaggtagtttagaaagacggaataccacattagtgctatattcattatttcggagctcgattaccgaactgtttttattcgtattttcgtccaataataatccgctcagttgagtcgatgccaaataagaagattcatctatcttgtttcctatttcaatgtcttcctcacaagatgtgaaggttgccatagtgaacattaccactggcaggaaagcatatttgatattgtttatcatattcatattcaattcttagttaaatgatttattattgaggcaatgaaacagattcccatttaggttctttttcgattgtcaaatcatagccactcacgctgtaatctttagctactgtacccgaaccttcgtcgaatttccaatatgcaatgagcccttccgattcaggttctattgtgtagaagtgatttgttgcctgaatttcttctgctgttaatgcacgattccagattcgtacttcggaaacgacgccatcaaaatagcggtcatctttataggaataacctacccagaaacaacgtgagccgtcttcctcattggtatgtttagcaccaagactaacagaactctttcccgttgaaccggaaagcttttctacgccattgatatatactttgacattacctttattgaatgcgacagctacatgataccacttgccactttcaagttgaaggtctgcgcttgtacaattgttaacagaagtagctacttgaagttggttattcggaatggttgcgtcaccgatacggagcaaataattgctttcgatacccatcaacgtgttcagagtattagggaatgaattggccttgaacagtatctccatcgtattctccgttagattattgaatttggagtcattcttgaagtccggataagcacgattacgactgatattacataccacattaataagtgatgctccgcggaatacataataatatgtcttagcactttgcaaaacgccgattccttccactgatttaatagtgactggaagcacataagtggttttgatatcaagttctcctgtattaatgaattcaataggcaattctggactaactatactacctgatttgatggtagtcgaagtttctggcattgaataatgttcttcagaaagaagtactgcagtttcatcgtaatatgccagtttataagttgataaaagttcgggagcaggtgacatagtcactttgatatcatgttcttcaggctttgctatggctactgaaagaccagtttctacatttgtatcaccagctttgaacagtatttccttagtaaagttcgatgccgaaatgaagagtttattgtcataatgctgttcattttcatcgttgttctggcaaccggcaagaattattgagaaaccggcaagagctgtaaatattaaattgtttaatttcataaggcagttttttatttaacggttggactcaatatacttatagcttcttttaaggttgggtatacattgctggcattaaaatagtctttttccgctgcatcaattgaaattccagctttggtgtagtcaggcgtctttgccactgcccattgagcagctccaatgatggcagatgagccatctccgagttcaccattgtaactccccgaattggtaagataaggcgttgttactcccatgatgaagcggtcggttggtacgttttttgctgatgccatgagtatgagataagacatctcgtattggttttttgctccatgcgcattgacaatgatgtatttacaatcagaaagcagacttttaccaataacgttctgcgggtaacctttgaaaagcaagtccttattagtattcgcaactttccagttagctaccgcgtcaaagaatgctccttgacgtgctgtttcagcggcaatttcattctcttcaacaagcgaattgaggtcgaagcctgtataattcactacaattccatctacatctaaagcgttacttgcggcgatttgtttagtgacctcacttttgcagtattcaataaaacgtgttgcatcgtcgacagtctcttctccttcttctccattttctgtttcatcagattcgggattaggtacagcgttggctgcttcttcttcaagaatctttttccatgcactttctatagcatcgaaatcaactaatcccaatacttttgtacccaatcgacgtacttccttcatctcagatatatttgcctgatttacttccattgtattgtttagacaaatatagtcgagactgtcaggcatatcagtaagatgttgactgcgtgaggttgttacagtacttacattattaactgaaacaattactacctgatggtctgttgctttaaagttgttgagagattccaggtattgagcataaagttccggattttgttcctccatagaaggagtatgtatattgatgctttctggatctgtccagtcagaacacgagaactgcatcatagaacatgccagcattacaggcatgagatattttatttttcttctcatatatgctataattaaggtaattttatttgtataatttaatatactaagtacttggtatatatttttattttttgttactcattggttgatttatttacagtcccaccatacgtgagttgccatcgtatctcctcttttagtcttggactcttgtgtcaatgtcgcaactgctgcttctacgctttctctattttcacgatattcatcagttggatatggcatgcgtcgtgcaccttccgcatcattaacaattcctccacttgcatttgctgccattggcattaatttaggatagcctgtacgacggtactcagtccatgattccataccatttggaaagtttgcaatccatttttgagtaataatctgttctaagcttttttcaaaatcacctccagaccatgccacagttacatttgtattaatagctccagagtaatcataagtttgggcactttgtcctttcagtggatctttatatgcttctacttttcccgtacttgcaagataattttcgactccactggtaattccgttttcttcaaacgacaaacggattccttcctcatagaagtctttagctgttcctcccatgttccagttacgaagagctccttcagcacgcaagaaagcgacttctgatgcacggaacacaactatattatcactcgtagtgactttcatacaagaagagccttgtgaccaggagttatattgtccttgcagaataccccgacgtaaacctacataactttcttctccagtatatgcatttcccgacacggtgccaaaagtacttttatcataatatgcttcgcgacgaggatcgttgtatgcattcatgtagcaggttaaatccgctgaaattcgtgcatctgaccatagtaccataaaacgttgccatggattatgatcggcaactttacgataagcgccatcagttgcagcagtcataacacctgctgctacagcttcttcagccaattgctgtgatgtttttccattcacgttaaatcctgctacatagcaagtacgcatcgccattcttagcttcaaagagttggcaaacttataccatgctgatgtattgccattataaattctatcagcacttgagctgaagctttggttgctaaactttcctaatactgtaataatattatccaaatcttctagcattttggcatagacagcttgctgagaatcataaggggatttgatcgcattagctgcacctacttttgaataagggatgggaccatatgtatctgttacacgtaacattacgacgatacgatataactcggccaacgataagaaaagttcatcatcgctttgatttttcaaattgaagtaatcagggtaaaactttgaataaaaatcattgaatggaatttttttccaatcgtctgaaggattataagttgcgtaacgaccagaccaacctgtacccaaattggagtctgctacatatcccgaaaatgctcctgccatcaaacagtctacatattgagaaaagttctcttgttctggcatcatcaaatcttgtaaattaagagctaatgatcttaccaaataccaatctactcccatgtcattttggtctggttcatgaggatttttattgtaatcttcaaagtttcctgtacatgcagttgcaccgaaaagaaacataccagtgactataaactgtattattgtatttttcttcatcttttccgtttttagaatttaagtttcaaattgaatcctacgctacgaaggctaggcatcataaagtaatcaattccctggtaatagttacctgtagtggctacagattcaggatcgaaaggagccttgcaataaatcatccacaagttacgacctaccagcgaaagagtgatatccataatatttttcaatttctttcttgggatagtgtagctgacagaagcttcttgcagacgtaaattggtagcactataagtgtaatattgaggaataccgctgtcggcaccaaccactgtataccacttttgcgcgtcaatcatatcgttgccgtttatcacgactccaccattatcacgagctgctgctgtagcttcggatacaccataggagtcaagaacggcttgagtcgcagagtaaacgactcctcccaaacgggcagtaagaaggaagccaagtccccagttaccatattgaaagtcattgcgccatgccatattagcttttggaaaaacagatcctaaataaatatcatcagctttgtcattcactgctacatttccatcggcatttacataaatcttattatttgaatctcgaagcaagtcagactgtgagtagagatcacctaaagatccacctacttttagaatgaaccgtgcctttgataaaccacctacatccatacggtcttttgttatttcttcaccggttacagggtttatgtaaccatcaatcaggcttaaaatcttgtttttattggcactgaatgtgtagttagaactccatgaaaacttgttccatgtattcttgtaaccaagtgaaagttctacaccacggttacgtacgttaccagtctgcgcatagaatgtactatagcctcctgttggagaaagctttgcatccatggtttgattgtaagtcttggtattatagaatgaaacatcaaaattgaaatgtttaaggaaacgtgcagtaagacctacttcccaagaatctgtacgttccggtttcaaatcatacaatggatatgcagactgagaagagtatgctcctgttgaagtattccatgaaaaagttggataagcaaggaagcgtccaaatggtagacctacggatgcccaagaagcacgtagttttaagtatgaaatactttcaggtaatttgaaaagttcagacaaaacaacagagcctcctactgacgggtagaaaaaagaagactgttttgagttcggtcccgctaattgacttggccaatcattacgtccggtaagagtcaagtagtaagtacttctataaccaacttctgcagatgcaaatatagattgtgtttgttcacgataaccagtttcttcacgtttcccagtttctttatccaattgagcaactgtgaaaaagttaggaagtccattcgctgcaattggtccactaacggcaagagcttcagaacgattgtctgaataagatgctccgatattagctgttaaactccaatcctcgccaaatgttttatttatattcaacaataagtctgcatatgtttgcttgtcacgagtgtttgttacaccataaaaaccattttcaccttcagcaatagttgcgatggtagaggcatagtatttttgtgtatatgtgttgtatgaattatctagacgtacacgtccagctacgttcaaccaacttagaatatcgtaacttaaagctgcactcaacatataacgatctttgtcattttcacgcaagttacgataattaatccagtaaggattttgtaaacggaacgatccccctccttgaggccaatattgcgtatacatattacgctctaaatcataacgttcgtacattttgtaatcttcccagtcatttccacgcggaaacaggtaagcagaagacaatgggtttgcataaataccttgattcaccatattacggtctttctgcataatatattgagcaccaacatccagtttcatcttatcttctagaaaaagagtggtgttccggaatgtaaagttatagcggtcgtatttgttatttggaataatgccacgcgaattaacggctgcggcagaaagatatgtctgattgtgttcagtaccagtagaaagtgttacagattctgttccaataagcccagtctgaaaataatcacttgcaggatcgtatccgcggtaattagcttcattcaatcttttaccccaactagcatctgttccagaagttccatagcgattctgaaactgtggcatgacgaatggagataacatttctgtattactagatacggtcaaggctacacgacccacttttccttttttggttgtaatcacaatagcaccattagatgcattgctaccatacaatgcggcagcagcagcaccagacaaaactgacattgattcaatgtcatctgggtttatatcagctatagcttctgtagagccttgcgattgcatctcttcagaaccaccagaagcgctcaggttatacattggaataccgtcgataacataaagagcattagacgattgttcgatacccctggagccacgcataacaactttacttgcaccaccaataccagaagaagaagagttgatatttaaacccgcaacctttccgttcagtgaattaataaagttcgcatcttttacagctaaagctgattctgcatcgacctgtgtgacattataactcaaagctttctctgaacgcttaatacccaaagctgtaacaactacctcgtcaatcacttgggtatcatccatcatcgtaatattaatggctgtctgtcctttcaaagggatttcttgtgtcttatatccgatataagaataaacaataactgggttattgctttttgtcacaattttgtagttaccatccaaatcggtaatagctccgtctgttgttcctttcactaaaatgctaacaccaatcaatggttctcctttagcatctacaacttgtccggttatagtacgttctttcccgctttgttgttgtagtgaatcggaattttctttttctgataaataaattatattctcttctattttataagagatatctttatttttcaaaagtgtgtttaaaacttgctctaaagaagcatcttttacttttaaaggttcaactgtgacagttgatagcttgtcattgtagaaaaattggtactttgattgtgattgaatttgtttaattacagttcctaaagttgtacggggagttgataaggtcaactgtgccgcagcccattgtacaggaactgctatcaacaaaagaatcaataaagctcgaaataacttcgactttcgaagcgaatgtttgctttccatacatttaatttaatggttatacattttattaaactcaaaaagaagagtgtcgactttcccttcctttgttaataaaacaatgctaatataataaacacttagtccattttctcttttttttcgaaaaaagtaagaaatatctgatatctccttgaataacctatatttagaatttaccaagtacttagagaacttggatgaaaataatgtgattaaaatctttaagtgataatatatatgaaaagaatagtaaaaaacagtttgtttacaacaatattgatggtgtgggggatgatgtattcctcatgcgaaggctggacagacccagaaagcattaacatccattaccctacatttgaagagcaaaacccgcaactgtatgctgactatatcagagatctgaaacgctacaaggatggagaacataagttagtctttgtctcttttgacaatccggaaactaatccaatcaatcaaaccgaacgtctcaccgctatactggacagtgtggattttatctgtttgaataatccagaaaagctctcgtctgaaacacaagccgaaatggtaaaaatacgcgagaagaatatccgcacgctttcctgcattaattatgagagtttagaacaagaatggaacaataaggcaaaagataattccgaattgacggaagaagatgcacaaaggtatctgaatgaacgtacggatgctatgctggttctatgtgacaattatggatatgatggtatcctaattgactatacaggactttcaatggtgggtatgcaagaagatgtgttacaacaatacaaggcacgtcagcaaaacttcttcagcagagtgttggattggcggattaagcataccgacaaaacattggttttttacggttatgtgcagtatttggctccagaaaacatggatatgctggataaatacaatcatctgatactgaaaaccgcttcttccaaaaacatggaggatctgacattaaatgtttttatggctattcaagcaggcatagacgtagcaggaacgaatgcggatcttgttccaaaagatcgttttattgcctgtacacagtttcctcaacaggaagataaggatatgataattggttattgggatacacgggatgcaaatggaaataaagtattggctgcacaaggtacagctcaatggattgtacaggcatcaccagattatacctgcactggtatttttatcatcaatatccaaaaggattattacaataatacttatggaacagtacgtgaaactattcatataatgaatcctaataaatagaaatacaatatgaaattgcatatttatcaattagcatttatagcacttactgcatttacggtaagcagctgcaaggatacggatattaatgatgaacatcattatgacaataagctttatataagttcggtacccgtaacagaagatttactgattaaagaagatgtattgtttgacagtcgtaaaattacttatcggcttgctgctcctgtcgacaacgaaatccaagtcagctttgatgccaaaccatctttagcggctacctacaatctaagttatggagataatgctacagcacttcccgaagcgttttatgatattcctgtgaagaatgttacgattcaacccggaggaatttctggagatgatatcatagtgaatttcgttaatttgaatcaattggacgactcaagacgttatgtgttgcctgttacaatcacaaatgtatctggaattggacttcttgagagtgcccgtactacttattttatcatcaaaggcgctgctcttattaatgttgtagctaatattaaagaaaactattttccgataaaatggaatagtgatgtaagcaagatgattactattacagtggaagcattggtacgaagtgatgactgggtggccaaacgtgataatgcactaagttctgtttttggaattgaaggtaatttccttatacgtatcggtgatggcgaccgtccacgtgatcaacttcaggcatttgtgccaggtggaagttttcctccagcaaatcacgcaccaggtattggacttccggtagacgaatgggtacacatagctgttgtgtataacactgtcaataaaaaccgaatctattacaagaatggtgtggcggtgtataaagaccagtcagcaaatagtacggttgatttaactaagaattgctatataggccgttcttttgatggtacccgctggcttccgggagaaatttcagaggttcgtatttggagcgtagaaagaactgcagagcaaattgcagataatccttataaagtaaatcctgccagtgaaggacttgtagcctactggaaatttaatgaggggtctggaaaggttgttatagatcgtacaggtaatggaaatgatatcactgcgagtaaagatccgatatgggttcctgtagaacttcctcaaatatattaatccttttaattaaaaagaatattattatgaaacaaaaatatctgataacagggttgatggttgccatatttgcaggcggcataacttgccttacctcttgtgatgatgatcttgtcataaataaagcaatagatgagtcagcatatactggcatttatgaaaacaatggatacttgcgtgacggaaagtccaatttgtcctctaacgtagtggagctatacaaagatacttatactacttctgtaaaaatgagtcttagtaaaatggcgagtaccagtacttttgctcaagtaattattgatgcagactatttggatacttataacaaagagcatgaaaccgattttgaattgtatcctgcgcacttggtttcttttaagaatgacgggaagcttattgtagatgcacaaacaaaatctgctcagactgacatcaccattcagacggacggcactttgaaagaagataaaacctatgctttacctatagctcttacccacgtaagtagcgacattaccataaaagatgagaaagctggtcattgtatctatttgataaaagatatgagaaagttaggaaacacttacaaaggggaagatgtagtaaagtcatttgtcttctttgatggtacaaatccactgaatgctctttcttttcaactggaaaacggaaaattgctgtgggatgtagtatctccatttgctgccaatatcaactgggacgcacaagcccaacgcccttatttaaaatgtaatgcttacatacaatatttgctagataataatgagaaatttttgcaaccacttcgtaaacgtggaactaaaatagtattaggaatacttagtaacggggatataacaggagtggcgcaactttctaaacaaggtgccaaagactttgcacgagaactagctcagtattgcaaagcatataatctggacggggtatgttttgatgacgaatatgaaggtgcttatgatccgaataatccagcattaacagagcctagtgaggaggctgcggcacgtttatgctacgaaactaaacaagcaatgcctgataaaatcgtagcagtatatgcattaagaagaatgtatagttcgaaggcaaccgttgttgatggagtaactattaaaaactggatagatattgtagttggtgattatggtagagatccttctcaagttccgtatggggacctgacatccaaagaatgttccggtcaatccatggagtttgttagaggtacaggtggcgatttacagggacaaagactgataaaccaaggttctggatggtttatgggcttttcaccgaagccggaaaattatggcaatgtattccggcgtctgtctgatgtgagaactctgtatggttctccgttacaagcacctaccgtgttctacaaagacaatgatgccacaccttaccaatatcccgatgatttgcaataaattaaaaaacaattgtagaaatgagaacactttatagatttttcttattattggcagtcggtttgctgacagccctttctggatgcggcgaagatgaaactccaagtctggctacctatccggataacaatttttctcttgtggcggaagacggagaaggctcggaaataacagtgaatgccacctataataatgagggtatattagaattcgataaacccgtaatattcacctttcgttttaacgcttcacccgaggacgcaatagttacttttgagccaatcggagaagatgttgagttaagtgataccaaattgataattccggcaggctatacggatgccagtgttactttgggtataaaaaatatggatgtttttcaatctaattacgatgaagctacctataatttaggagtgagagctactgtgcaaggatataaaatgccatctattaccttggaggcaaaagctttgataaagaaagaggcgtatgtagctacaggtttcttggaaggaaaagtcggtaataaaactacattcgaacatacttatttcaacggagaatttaaggacacggagcggaatctatatacattcagtgtacaattggatcgtcctgctcggaaagatgtaaaggtgaaacttacaacggaaggagtggatgacgaatacctgaaagacattagtattactcctgcagaaattataattcctgctggtgaaaagacatcaggagatattacttgggagattactaatgactttttgttgcgtacatcggacgactcgtcaaacacattaaatatcacagctgtttttgaatgtgaagatccggtcttcgtgcaggatgagaaaagaagttctttcaccttgaatataaataaatatataagaggatttgaacacatatcttacaaacggccttccggttggatagaatgggccaaacagggttggtctgtagatgtggaagatagtagtgatttttatcaaaacgatggtggcggttcgcttattgatggtgaaaccaaaggtaactatgaaggtatatgttctgatggagatatttcatttacactcgatatgggagaggaaaaaacaatcactggagtaggtcttgattatatatattattatgctcctcaaaatgtacaattatcagtttcttctgatggaaacacatggaattatctaggaaaagtagctactgctgatgagaatgccgattactatcaattcattgaatctataactgcacggtatgtgaaatttgatcttttggcttcttggggatgtgagctttatgaaatatacgtctttaagtagtattgagtctaaaaagaatataggttaaagtttgtattcgagaggctgtctcaagattgtttttgagtcagcctctttttaattgctttttcaaagaacgggcaggcgctaacttttctaagtctaacgtttgctcatgttcctaaatatttgaattaaatgctacatagtgaaataaaatatctatcatagtatcatttatttcaataatcttttaattatcaaaggaataagtataatagatagcttttagaaaatgcatctatcatacttttaccagtaaaaacaggttatctatcattgtgcaaaatagccatataagggtcataataggtgtaagatagcttgtttttgtcacaagggagccatataaatctgattatcgtggcttaataatgtaaatgtaatggcgataagtttatagcccacgtatgtgtgctgtacagtccgcatgtgtgggctgcacggtttacatacgtgggctgtacagcctgcacatgtgaactatagaaagacagccgcttccaatagattattaagttgtcaatacaggttatcatcctataaagtgtgcattcttatgcctttaaatggatactctcacctaatgctacactaaatagatatagtatgggtgtgatagatacccgttttttgcaataaaagtatgatagatgcattttctaaaagttatctatcatacttattcctttgataattagaagattattaaaatgaatgatactatgatagatgtttttctcactatgtattcaaacctgtatcattttactcatttccgtacggtgctgaatcaattgatattttagcaaataagtattgaaacgcagattaacgcagattttcgcagattattagaaggctgcgccatgtttgagaacttttttattctttgcgaaaatctgcgttaatctgcgtttcaataaatgttcatttggctcatttcggtgcaatacagaaagactcaaaccaagattagggctaaattatcccgcaaggattattgttgcttagagaaagaatagggcatatcttcttctttagttcctctattctgattaggttgattactcatttcaacattgatcgtacctcccttgagcaaattttcgtgtcggagataatttttagtgtaatcagcaccattgacattcatcgaattgacataaaattttttcttactattattcggagcatcaataaccaaactattgccattttcaaaatggagtgtagctttcttgaataacggagcacctataatatattcatccgttcccggacaaacaggatagaaacctaatgccgagaatacataccaggcagaagtttgtccgttgtcctcgtcgccacaatagccgtccggagtaggagagtacatacaatccattacttgacgcaaccagtattgggctttccaaggttgtcctgcatagtcatataaataaatcatgtgctgaatcggttgattgccatgtgcatagttacccatattcatcacagtcatttcacggatttcatgaatcacttggccgtagtagctatcatcaaaaataggaggtacggcaaaaacagaatccatcatggtgataaacatctcttttccacccatcaagtcaatcaatccttgaggatcgtggaataccgaccaagtatagtgccagctatttccttccgtaaaagcatctccccatttcagcggagagaaaggagattggaatgtaccatcttcgttgcgtccacgcattaacttagattccttatcgaaaagattcttgtagttcatggcacgttttgcgaaaagattaatctcttttttcggacgtttaagttcctttgccagttggtagatacaccagtcattgtatgcatattccaacgtgcgtgcggcgttctcattgatttttacatcataaggcacgtagcccagtttattgtaatatttatatcccagacgtcctgttgatgatacttgtggatgtacattctccgttccgtgaatcagcccttcatacaatgtttttatatcgtccactttcactcctttcatgtaagcatccactaagacagaagcagagttgttaccaaccatacagcctctgtgccccggacttgcccattccgggaagaaaccgctctctttatatgtattgatcagaccttcctgcatttccttgttgactgacgggtacattaggttcaataacgggaataggcaacggaaagtatcccaaaagcctgtgtcggtatacatataccccggtaatacttgcccattataaggactgtaatgaacaggttgtccggcagcatccagttcgtagaatttgcgtgggaagagcaatgaacgatataaacaagaatagaatgtgcgatattggtcgagattgcctccttctacttctattttgcctaatacttggttccacgcttcttttcctttttgggctagctgttcgatattatctttgcccaactctttcatattcaaagctgcctgttcaaaactgatgaaagaagaagcaattcttgcatgtacttgttcgcccttatgtgtttggaaaccaataatggcttcggcatgatctgttgtctgttcggtaacattttcctgcagattgccattgactaccgtagctttatatgtgaaaggcttgtcgaattcaataataaagtaatttttaaagttttcgggaactccaccgctgttgcgagtcgtgtaaccgataatcttgttttcttccggaataaccttaatatacgatcccttatcagaggcgtccactacaacatacgaatgatcgttttccggaaaagtgaaacggaaaagaactgcacgctcggttggagccatttctgtcactacatcatgctctgcaagatatactttataataataaggagtggcagtttctcctttgtgggcaaaccaactggcacgcttctcttcattgaattccggtttgcctactacaggcataatagagaattgtccgtaatcattaatccacggactgggttgatgtgtttgtttaaatccacgaatcttattagccgtataagtgtattgccatccgtctcccatctttcctgtttgtggagtccagaaattcatcccccacggacgggcaatggccggataagtattacctgttgataactcgaaactagattgagaacccataagcggattgacatactgcgtccagtctttggcttttgcaaagacgatacaacttaatgcgcatactaataggagatactttttcatggtcttatttattatttatggctcaatcgaatcagaaatcgattgagccaatttatttttcaaggttttgttttttttattcaatttgaacagctagtaccaactcattcctcttctttggaggagagagctggagagaggactccccatttcgtaggatgatcggtcatcttgatttccatcgttcctccattcgcaatatcctgatggttaaagaatggaatgtttagagctttaccgttcagcaatacactttcaatgtatttattctttttcccattattctttactacaatactgaaagtctttccttcaggcagattgataactgctttgtcgaaggcaggacgtccgatggaatataccggcttgccgggacatacctgatagaatcccatagagttgagtatataccaggcagacatctgaccgcagtcctcattacccgaaagaccgtctatactgttggtatactgacttcggtaaacgctatccaccaactcttgagttctccaaggatggttaacgtagttatatagatggatcacatggtgacttggttcgtttccatgtgcatattgcccgataagtccgctgatatctgatgaggttgtctcaccttcaagtgatgaatcggccgagaataaggaatcgagtttctggacaaaagcatcttctccacccatcagattgactaatccttctacatcatgcggcacaaaccaagtccattgccaagctgttccttcacaataatcatcgctgcggtgagtagatgcacgcggattgaatggagtacgccattcaccttttgagtccagtccacgcatgaagcggattgatttgtcgaaataaaattcgtacgccttggcaaagcgttcatactttgctttggattcaaaatcactcattgcttctgcaaagatagagatacaccagtcatcatacgcatattccagagctttggccactgattcgttttcgcggtcacaagggatatatccgatggcattcttataatattttgctttaggcatgagatgaggcaataccaaatccggacatttgatgccggtagtgtcatattcggcggcacgcaggcaggctttataagcctctttggcatcaaaattgcgataccctttcatgtaggcatccacgatgaccggaacagcatgataaccaatcatagtgccggtgtaattggaagccaagtcccacatggggtatatcccaccttcctgatgcttcttaattaacgaattgataaagtgattattcagatcaggatcaatgatagtcattagcggatgtagcgcacggaaagtatcccataaagaaaatacagtgtatatcggattaagggtgtctccttgatgcacttcaagatccattcctaaataacgtccgtctgcatcagtgaacagatttggactgattcccgtatgatagagggccgtgtagaagatggctttatcttctttatcggaagttgtaatatcaattttggaaagatattcattccatgccgtacgtgcgtctttacgtactttctcgaaatcccatccgggaatttctgattcaacgttcttccgtgcaccggcaatatcgacagcggacacacctactttaacaagaacctgctcgtctttactggtgttgaaatgcaataatgctttgcagacaggaagccgtttgccattgtccatggtgatagaatccgtaacgagcgtataagagaatggcttggaaaatttagcgtagaagttgatatattggtcgaaagcccaataagttgttttcttgtgtccacagatttccgtatcgcttattacttctatttccatctcggagttagtctgtcgttgcaggctgtaatccaggtcgatgataaatccggattcggcgttttcgggaaaagtatagcgatggattgctcctcgtttggtggatgaaatttcagctttcacctggtaagtatcaagaaagacagaataatatcctggttctgcgatttcattcttatgtgagaaagaggaagcgtatgctaggcgttggctttggggatcggttgtacgatattgttgtttacccacagttggcatgagcaagacatctccatagtcgcaacaacctgtaccgctgacgtgggtgtgtgagaagccattgatggtagagtcggcataataataaccggaacaagcatcccaaccatcgatccgggtgtccggactgggctgaatcatcccgtggggaactaccgctccggggaaggtatgaccatgtccaccggtaccgatgaaagggttgacgtaagcactatagtcttttacattagtgggggctgtacaggagctaagtgtgaataaacctcctaaacatcctactattaggaatgtttttaatttcatggtattaatagcttttaagttttagccggttcatcttttacttcttatttgggagaaatgaagatattgtttccgacaattttataatcaataggtatagagttttgcaatgatttcaacactgactcgatattcgatttccttttcagtacaccggagtaagttttacccgtctgaatgtcaggagacagaatgattttcacatcatagaaacgctccagcgctttggtgatggtgaagatatctgctttttggaatggaatcagattatcgtgccaaacagcatccaacttggcatccacttgtttcacggtcaatcgtccattatttttgttcagttctgcacgttgtcccggagtgaggataatctgcccctcttccttattgccttttacttcaatctcaccttcaataagtgtcgcctctgctattcggcaacgtttatcggattttaaattgaacgtagttcccaatacgcgtacgcgtattgcatcactttgaacggtgaatggcttatggcggtttttggtgacctcaaaataagcttctccttccaggtagacattgcgttccttttcggagaactcacgtggatatttcaaggttgctgcattgttcagccaaaccttgctaccatccggtaagactacctccttaacaatgccttcgctggctactgcgaccatcatttgttgattgtttccgctttgatagaaccaatatccgattccaccacccatgaccaacattgcagcaatcactgcggcatatttcatccagcgatgcatgcttagtattttgctctgtttacctttctcttcgtccagctttttatagagttgtttttccgcacgaagtatccgttgttcatcagtgtactggtcgaatttacccaaatgataaatttcttccatacgaaagagctggcgggcgttttcttccgattccttcatccaggcattgacctcgataagctcttcttcagaacactgtcctgtcagatatctgtttattatttcttcactcagattactcattttcttttccttcatattagtaatacaattcaaaacgcaaaaacacttattataatcgccataaaaataagaaaagaatcgcccaaagaggatcgagtcggccacgcaagtattttaaagccttatacatatgggcttccaccgtgcggagtgaaactccgagaatatcggctatttccttgtttttcatatcatgcagatagctaagtttgaaaacctctttgcatttgtcagggagctcattaattgcatcatgaatttccttgcggagttccttatcttcgatcctccgaatcacttcgttgttgtccggttgatagaattctgcgcgtctttggttgatttcttccatggcaacacaataaccttcttccacactgcggtgtttcaagacgttaagggcacgggtgtaaacggcacgatagagaaaggcctggatttggtcgcctatctctatgtggtcttttcgcttccataattctacaaatacgtcctgcactacatcctctgcttcttcttctcccaccagacgggtagcatagaaaatcaggctgggatagtaccggcgaaatagtgctttataggttatatcgaagttttcgttcattctctcaattggttgttctggtttggcttatgggttattttcttcgaatatgactccaattgctttaggggtgttactcatttcgaattcgacagttgctccactcatgatttgctcgtgagtaagatatgttttgtcatacggttttccatctattttgatggattggatatagatattttctttgttcactttgggggccagtacggtgaaagtctttccattcgccagatgtaattgcatttccgggaataggggagtacctatctcgtattttccactgacgggattgacggggtagaatcccatcgcactgaatacataccatgctgacatctgtccgcaatcttcgttgccacaaagaccggctggttcgttcttgtagagctcgttcatcactttggctacatattcttgtgtgcgattttcgtgtcctatagcattgaacagataaataacatgatggctcggttcattgccatgcgcatattgtcctatcatgcccgtgctgaagataggtagttcgtcatctgctgccggatgataggtgaacatactgtccagtttttcggcaaatcggtttttacctcctacaaggtcgatcagtccgttaatgtcatgctgtacagaccaaaagtattgccatccgttgctttcgcagatgtgtggcgtatagtcatcggctttgaagtccttgataaagatgcctttgtcgtcacgtggctgcatgaaagaagtagcggggttatatacattcttgtagttttgagaacgtttgtaaaattcgtccgcaatgtcttgtttgcccatcttcttcgccatttcggcaatgcaatagtcatcgaaagcgtattccagtgttttggataacgaccagttttctgcgttgtagtggtctgttacgttgtaaggtatgtatcctaattctttgtagagtccgatgccgcggtaattatccagattagccgttgctatgcaagcatccaaggctttctttgcgtcgaagtcgccgattcctttcagataggcgtctacaataacaggtacagcatgatagccgatcatcatgtctgtttcacttccgtagaagttccacaccggtaggcggccattctgttcgtagaaggcgatgaaggatttcaccatgtcgttgacacgctcgggttcggtataagtaaagagcgggtgggcggcacgatatgtatcccatagggagaaagtgctataattaacccagccgtcggcttggtgcactttcttattggggccgtagtaagctccgtctacatcactgtaaatagttggagcaatcattgagtgataaagagcggtgtagaagtttactttatcgttctcattatcgctttttatttcaatctttccgagctggcggttccagtttgcttttgtttcagccaagtatttgtcgaagtcattttcggggacttcagcttgcaggtttttggctgctccttccatactgacaccggaaatggcagtgtttactaatatctgttcatccttttgggtattgaaatcgaagcgggcgataacagcggtgccgatacgtttattgtctttgatgatggcagttgtgtccagttccattttctcaaaaggcttggagaatcgggtgcggaaatagatgtgttgatcgcgtgcccagccgtcggagaaacggtaaccttgaatggtgacggagtctacgacttcgatatgagaatcgttggtaaaatcccagttcatggctttcttcagatttaagaagatagcagattgggcttccggaaacgtataacgttggataccacaacgctcggtggcagtcagttcgacgttgatgttataatcagtcaggcgtacttgataataaccggcatgagcactttcatccttgtgggagaatttagaatggatgccaagcggtgcttccgcttctttgtagggaagagtgacaggcatgaaagagatgtcatacaaatctcccgctccagtgccggagagatgcgtgtggctgaaaccggcaatcgtactatccggatagaaataaccagagatacggtcccatccggggagtccattatccgggctaagttgcaccatgccgaaaggagcttgggcaccaggataagtgtttccagtgaagtctgttccgataaatggatttacataagatgtgtaatctatttcgtgtttttcttgcgtaggggtacaagaaatgagcatgcaggttaacagcaggcatagataagcaggtgttctcatcattctttaggtattagtgattacttattttatttatttgaaggataagaaaaataattaatctggtcacaaaggtagaaaaaaactgtgacaagcctaaattataggcttaatattttttaagagagacaaatagacttctacatccggtcgatattcctcggtgccggacagtgcttatcggtgcctcgattagtgtaatatttaggcgcggatttcgtagattacacggttttaagaataaaaaatccgtgtaattcgcgtaatctgcgcctaattttaaatctttatgtaaaacgagcctattatctttttattagactccttttcatttacttttagattcctgctagctccagtactttttcaacagctgccggtagtccgtcagtgtttttacctcctgcggttgcaaagtgaggctgaccaccgccaccgccttgaattagtttggcagcttctttcactaaattgccagctttcagaccactcgcaaccagattgtcgctaagcatgactgtcagcatcggttttccgttatctatatttccggcaacgaagaacaagttttctgtaatctcaccacgaagttggaaagcgatattcttcactacttctgccggtagcggagcacagaacttaaccactttgatgccgtgaatttcttgtatattcttcaacagtctttccttcagcgctgcttctttttctttcatgaagtcttccacctgcttcttcaatcctgcattttcatccagatatttgcggattgcaatacccaagtcaggagcattgttgaagagagccttcaagtcgctaagtgtatcttgtattgtatccagcatttcttccacgcgtgctccggtataagcttcaatacggcgaacgccggcagcaacagaactttcggagatgatttttaccataccgatatttccggttgcagctacgtgtgtaccaccgcagaactcgatagaagtgccgaactggatcacacgaactctgtcgccatacttttcaccaaagagagcgatagctcccaactctttagcttcctcgataggaatattgcgatattctttcaatgggatattagcgcggattcttgcattgacgatatgttcaactttacggatttcttcatcggtcactttctggaagtgagagaagtcgaaacgcaatgaatccggtgtaaccaatgaacctttctgttcgatgtgttcacccaatacttcacgtaaagcagcatccagcaagtgggtcgccgagtgattggctgcgcaggcagcacgtttgtcggtatctacacaagccatcatcggagcttccggatgttcgggtagctttttggtaatatgtatcggaagattattctctttctttgtgtcgaccacttcaatcgtctcgaactcgctcaccaatacacctgtatcacctacctgaccaccactttctgcatagaacggagtatagtcgagtacaatctgatacaatgtctggttcttttgtttgatctgacggtaacgaaggatagaagcctcgtattcagtgtaatcgtaaccaacgaattcagtagtcccttctttcagtacaatccagtcacctgtttcgatggcggcggcattacgtgcacgctgtttctgttgctgcatttcttcattgaactcttcaatgttgacagtcattccgttttcacggagaatcagctctgtcaagtcgagcgggaaaccgaatgtatcatataaagtaaaagcatctttaccgctgatttcagtttttccattggctttggtatcttccattgtcttgtccaatagacggataccagtttccaaagtgcggaggaatgattcttcttcttccttgattactttttcaatcagtgtcttttgtgcaaccagctcaggataagcttctcccatattatcaatcaatacaggaagcaacttatacataaatgcctgtttctgtccgaggaaagtatatccgtaacgaacagcacggcgaaggatacggcggatcacataaccagctttcgcgttagaaggcaactgaccgtctgtgatagagaatgcaatagtacggatatggtcggcaattacacgcatggcgatgtcctgctgcttatcttttccgtattctgtacccgacatagctgcaatagctttcagcattggctggaatacgtctgtatcgtagttggatgtttttccttgtaaagccatacaaaggcgttcgaatcccataccggtgtcaataacctttgcaggaagcggctcaaggctgccatctgctttgcggttgtattgcatgaatacgagattccagatttcaattacctgcggatgatcgtggttcacgaggtcgcgaccggagatcttggcgcgttcttcagcaggacggaggtcgatatggatttcggaacaaggtccgcaaggtcctgtatcacccatttcccagaagttgtcgtgtttgttaccgttgatgatgtgatcctttggcaagaactgttcccaataagaagcagcttcgtcgtcacggctcaatccttcttcgggacttccttcaaatacggttgcatagagatgttccggattcagtttcaagacttctaccagatattcccacgcccagctgatcgcttctttcttgaagtaatcgccgaacgaccagttaccaagcatttcaaacatggtgtggtggtacgtatcgtgtcctacttcttccaggtcattatgctttccgcttacacgcaaacatttttgcgagtccgcgactctttggtatttcgccggatggttacccaaaataatatctttaaactggttcatacccgcgttcgtaaacatcagggtagggtcatctttaatcaccatcggagccgagggaacgatgtggtgtcctttcgactcaaagaaattcttgaatgaatctctgatctcttttgcagtcaacatataatgaagaattatgatttatgaattatgaattatgggctgtgggatatgagagaggggaagaatccccaataaatcataaatcacaactcataaattcgtaaaaactgtgcaaagatagcttgtttttattacttttgccgtattaacaagcgaaatatttccaaaaagatgcgcaaagtatactacatctataatccacagacccagacttatgatcgaatttaccctaccgtacggcagcgtgcgcttagtatcctgcgtcggcttttctatggaatggggttgggagcaggttgctttattgtattgcttttgatttttggttctccgtcggagaaggaattaagaattgaaaacagccgtcttttggcgcagtacaatgtgctttcccggcgtttggacgacgctatgggggtgcttcaggatattcagcaacgtgacgataatctgtatcgagtgattttacaggcagatcctgtttctccggctattcgtcaggcaggttatggcgggacgaaccgttacgaagaactgatggatttggcgaatgccaagctggtggtgaacatgactcaaaaattggacgtgctttccaaaaggctttatatccagtcgaaatctttcgatgatgtgattgatatgtgtaagaaccatgatgagatgctgaaatgtattccggccatacagcctatttcgaataaggatcttcgtcagacagcatccggttatggtacacgtatcgatcctatttatggtacgacaaagttccatgcaggcatggacttctctgctcatccgggaacggatgtatatgctaccggaaacggaacagtggtgaaagtgggatgggaaaccggatatggtaataccattgagatagatcatggcttcgggtatctcactcggtatgctcacttgcagggatttaatacgaaagtcggaaagaaagtggtacgtggtgagattatcggaaaagtgggtagtacaggaaaaagtaccggtccgcatctgcattatgaagtgcacgtgaaagggcaggtagtgaatccggtcaattattatttcatggatttgagtgccgaagattatgaaaagatgattcagttggcagccaatcatggtaaagtattcgattaaaatcttaaaacaggagtgttatgcttaatacagacaaagaattgaagctatattattcaataggggaggttgccgacatgttcggagtcaatccgtcattgctccgtttttgggaaaaggaatttccgcaaatctctcctaagacagcgggaagaggaatacgtcagtaccgcaaagaagacgtagaaacgatcggtcttatctatcatttggtaaaagaaaagggcatgacacttcccggtgcccggcaacgtttgaaggataataaagaagctacggttcgtaattatgagattgtaaataagctgaaagcgataaaagaagagcttttggctattaaacgcgaattggatggacgggaataaataaatgctaatcgatcatggattcgataggcaagaaacctcataacaaaatgaacggtgaacaatttgcatgatactgcaacttattcaccgttcatcgttttcttatttaccgtttgaaagctattcttctacacggctcacctgtttgatattctgtattttcttcagattgttgcagatggtttttacatcatccacatcatgtacccataactgaatttttccttcaaagataccatcttcggtttcgatggttagcttacggatatttacattgagctgcctggagataacctgggtgacttcattcaaaagtcccatattgtctataccttttatatatatatataccaggaaagataattctttgtgtgtatcccattctgttgctaatatacggttgccataactgctcttcagtttggcggcaacagggcattggcgtttgtggataatgatccggtcgttttcatccacatatcccaatacatcatcaccgggaataggatggcaacattcggccatgatatatttcttctgcaaactttcttccgtcagtttgagcacctctttcgggttgattttttctttttcctgcggttctttctcttcctgcttctctttgctattgccgaaagagaaagtcagatatttcttccagttactggtttgcttttctttcagttcattcttgtccgcttctcccaaaacgattgctttactgccaatggcagccagcagttcttcctcattcttggcattatgcagtttgcgtagcttttcgataacagcttcttccggacggacttcctcctttttcagaaactcactaaggatttcttctcctatcttctggtttgctttacgctctttgcggagaatggctgctatcttggcgcgggcacgggcagtggttgcaaaaacttcccattgcggttgtacgcgttgcgattttgaagtaaggatttcaacttggtcaccactttgcaatttgtggctcaacggcactaatttatgattgactttggcgccaatacaatggctaccaatatccgtgtgcagggaaaatgcaaagtcgagagccgtagagttctgcggcatagtcttcagttcgcctttaggagtgaacacgaatatttcagaagcaaataaatttagcttaatggtatccagaaagtcaatggcatccggttgcggatcatctaatatctccttaatcgttcttaaccatttttccaattcaccttcatcctcgctgcctcctccttctttgtatttccagtgggctgcgaaaccttgttcggcaacgtcattcatccgttcactacgaatctggacttcaatccattgtccgttgttacccatcagagtgacgtgcaatgcctgataaccattagctttaggatggctgacccaatcgcgcaaacggtccgggtggggtttgtatatcttggagatagaaacgtagatatcgaaacagtcattgagctcttcttcttcattacgtggttcgaagatgattcgaacagccagtaaatcgtatatttcttcgaaaggaacatgtttggtctgcatcttgttccagatggaatagattgattttacacgggcaagtatccggtatttcaatcccatcttatccagttgggtacgaatcggggccgtgaagtcgttgaaaaccttgtcacgttcagcggcagtagcattcaacttctcttctatttccgcatattcttcgggatgttcatatttgaagcttagattctcaagctccgtttttatcttataaagccccaagcggttggcaagtggagcatagatgtaaagcgtttcgcctgcaatcttatattgcttgttgggtaacatggaaccaagggtacgcatgttgtgcaagcggtctgctatcttgataagaatgacccggatgtcgttcgacatggtgagcagcaacttcttgaagttctctgcctgtgccgaagcgcggtcaccgaagattccaccggatattttagtcagtccgtccacaatctgggcgatcttcggaccaaagatattctcgatgtcttccactgtgtaatcagtgtcctctaccacatcatgcagcaaggctgcacatatagaagtggaaccgagacctatttcattgcatacaatgctggcaacggcaatcgggtgcataatataaggttcgcccgaacggcgtttgatacctttatgcgcctgattggcaaagttgaaagccttcgtaatgatttcaacttttttgcgatgcttagtattgagataatcattcagtagttcgtggaacgcctgattaatcatctcttcgtcagctatttctttgggggccagattatccataattgttatcctttcacttgcttagttctgcaaaaataagcaaatttccgaacgatgcaagcaggaagttatttatttgtatattttcaatcgttttcctgctgcaattttagtgctagacattccattccacctttgtatatccttaattgtgacaccatactttctggcaatagtggataaagtgtctccactttttattgtataataggtcagatttcccttaccggcaactgctgatgtcgttttgcgggttgcaggtgtaatatcctttacagcaacggttttccggttgcggaacaactcatcggcacgatgcgtataaatcgtatcttgcttatcgataaaagtactgatcgcgtcaataggcagtcttaacgtataaggtttgctgtcacccggaatcatttgcttcttatattgcggattcagactcttgatctgatccagaggtacattacaaaggtcagcgatttgttcgaagtgcagatttttgtttacttgcactgtgtcagtacttgccggaatattagtttccatcgggcagatattgtgatcgcagtagtaagtcatcacatagttggcagcgataaaggcaggcacatagccacgtgtttctttaggcagataattgtagattttccaataatcagtttcgccattggcacggcggattgccttattgattgtaccgggaccacagttataagcagcaatcacaagattccagtctccatagatatcgtacatttctttgagataacgtgcggcagcccaagttgctttaatcgggtcgcgtcgttcatctaccaggctgtttgattccaagccatagatcttacctgtaccgatcataaattgccacagaccggaagcgcctgcgcgcgacacggcagaggggttcagtgcagattcgataatcgggagatatctaagttccagtggaagtccgtatgcatccaatgcttcttcaaaaatcggcatatagaagttgcaggcactcaacatgaaagaaacctgattacgcaagcgtcctgcatacatatcgatgaatttgcggataatatcattataaggcatttccatgatagccggaatgcgtgacaagcggtcgatatagacagagtcgctgaataaagggttgatttcagctgtactgcaatctttgcctaagtcaatataatttttggctttccagtcgttcaacagactgtcaagtggatatgtcatacttttaggcaggtcgatgctttctttgcgttcagttccattttcacgaatcactacatctacactttgcgcttttacctgcgacgttgccaccagtaaaagaaaaataatcgaacaatagttaactaatttcttcatgcttcaataataagatcaatctaaattgtgtttttaaaatcgtaatacgcattgcagaccaaccgacttgctttttaaactgctagagcggaactggttgttattgtcgataacagccggttctactttcatgctcaagtcgggggttatatcgaagttagacaactctgcatctacataagcgtcgatgatagagatcagataaactccgataaaagcaaatatactaaggtcccgataacgacggaacatatcttttcttcgttttagtgtgttttttagctgctcctcattataagtggagttcgggggcaacaaatcttcgtaacttttcgtattcggattgctgtccataatgtccagataggcttgcgaatagtctttgtacatcttaccgttccaacttaaggcgtaagcacaaccagcaaatcccccatatataataggtaatttccagtatttacggttgtaaatctgtcctccaccggggaatacgactgccaaccacgttgctttggtcggattcgggataaatattttcttgttaatatcttgagcaggtggcggcacagtgtcggtctttacaacaatggaggcaggttgctctatctttttcagctctttcttgttggctgcatccaagctgtccgctatctgtattttagcagctgacaaactgtcgatggccggaagttctttggatggtatgatttggatagaatccttcttcaccgagtcctgtataatcggatcacgatgccttcgtgcacgggctttcggcgcttcgcgctgtatgattgttgtatctttccgtgccggagtaacagtggattgtgcatacacatcaatccctgccacctgtaaaaaacagagaagcagggcgctgactagtaactgatatttcttactttttcttgtcatttacttctttagcgtatcgaagatttccatgatacgttccagttcctcctcgttcccgaaaggaatactgatcttgccttttcccttttcagagcaggtgagttgtaccttggtgttgaaaaagccggagagttgttgcttcaataagttgaattcttcaggaagtttgccacgtttgggtgttattttccgtgtgccgcttttcacagcttctccttcgcttaatgatttaacaatttcttctactttgcggactgaatatccgtgttcttgtatttcttcgaatattttaacttgtagtttagggtcgcctaatgaaatcagtgcacgggcatgtcccatgtccaactgcttgttttgcagggccatctgtatcggagccggcaatttcagtaagcgcaggtagttggcgatcgtcgttcgtttctttccgatacgttcgctaagacgttcctgtgtcagttcgtactgatcgagcagatgctggtaggctagtgcgatttctacggcattcaggtcttcacgctggatattttcaatcagcgccatttccatcatgttttcgtcgtcggcagtgcgtatataagcagggatcgttttcagtcctgctctttgtgatgcacgataacgacgctctcccgcgatgatctgatactcatcgtccgagagtttgcgtaaagtgataggttggatgataccgatttccgcaatggaatcagccagttcctgtaatgctgtttcgtcaaactcacggcggggctggttgggattgacagtaatctttgccagctctatttcattaatggaagaagacccttcggttttcacatcatccattgagagcaaggcgtcgagaccacgtcctaatgcatttcttttttgtgttgccatatcttcttctttcttttatttatttcggttgataatctctttagcaagagccaggtggtttttggcgccggtagattccgcatcgtaaaggatggtcgggacaccgtagctgggagcttcgctcaatttcacatttcgttgaataacggtgttgaataccagttcctggaaatgacgtttcacttcgtcgtaaatctgattagcctgacgcagacgagagtcatacattgtcagtaagaaaccttcgatttctaaagccggattcagtttcgacttgatgattttgatggtattcaacaatttgctgataccttcaagagcaaaatattcagcttgaacggggataatcacggagtcggctgccgtcagggcattgatcgtgatcagtcctaatgaaggcgaacagtctatcaggatatagtcatattctttcttcaaaggggtgagtacttcttttagtatcttttctcggtttgggaggttcagcatttcaatctctgctcctacgagattgatgtgcgaagagattactttcaaagaatcaatctccgtatcaaggatagcgtcctgtacgttggctctgtcaataatacattcatagatagtgcattccgactgcttgatgtctactcccagaccggaagaggcattagcttgcgggtcggcatctatcacgagtacctttttttccagtgtagcaagtgaagctgcgagattaatcgtagtcgttgtctttcctacaccgcctttttgattggccaaagcaataatttttcccatattctctaaatttattggcagcgaaataagtgataaatccttagagcgcctacgaaaaaagagaaactttgcaatttctgttgataagtcgcctgttttgttaataactgtcggacgaaacggttaccaaacttcgacaggttcatcatttacctttctctttatgagcttgcaaatatacatatttatattggatatttatttctttttttgctcgcttgcagaagattaagatttgtaaacgggtaggagtgggggtgaaagagacttttcgatctgatgcggggaggtgtttggtggtacggcttctttttgttacttttgtgcgaatataaaaaaggaaaggattgaatatatggaaaaagagaagccgttgatacttgtttcgaatgacgatggcgtgatggctaaaggtattaatgaactggtgaagtttcttcgccctttgggtgagattatagtgatggcacctgatgctccgcgttccggtagtgggtgtgcgctgacggtgacgcagccggttcattaccagttagtaaagaaagaagtgggcttgactgtttataaatgttcgggaacaccgaccgattgcatcaaattggcacgaaacacagtgctcgatcggactccggatctgatagtcggcggtatcaatcatggagataattctgccaccaacgtgcattattccggtacgatgggagtggtttttgagggctgtttgaatggaattccttctattggcttctccttgtgcaatcatgcacccgatgctgattttgaagctgccggaccttatatccgcaatatcgctgccatgatcttggaaaaaggacttcctcctttaacttgtctgaatgtgaacttccccgatacagccgatataaaaggagtgaaaatctgtgaacaggcgaaaggacgttggacgaatgaatgggctgcctgccctcgtctgaatgattctaactatttttggctgaccggtgaatttaccgatcatgaacctgaaaacgagaagaacgatcattgggctttggcaaatggttatgttgctatcaccccgactacggttgacgtgacggcttatcactttatggacgaacttaataaatggtttaattagttgaaatttgaaaaagaaagcatgacgccctgttagtcatctatccctaccaactctcaactctcaactctcaactcaatgaagtattatctgattgtcggtgaagcttccggcgacttgcacgcctctcatctgatggctgccttaaaggcagaagacccgcaggctgatttccgttttttcggaggtgacttgatggcggctgtcggaggaacgatggtgaagcattataaggagttggcatacatgggatttatccctgtattactccatctgcgcactatctttgcaaatatgaagcgttgcaaagaagacattgtttcctgggaaccggacgttgttattctggtagattatccgggattcaatcttgatattgccaagtttgtccatgcaaagacacagataccggtttactattatatttctccgaagatatgggcgtggaaagaataccgtatcaagaatataaaacgagatgtagatgagcttttctccattcttccttttgaagtggaattcttcgaaggaaagcatcaataccccattcactatgtaggaaaccctacggtggatgaggtggcagcctatcaggcagctcatccgaaaaataaggagcactttattgcggagaaccaattggaggataagccgattatcgctcttcttgccggtagccggaaacaggaaatcaaagataatctgccggatatgttgaaggctgcttccgcttttcctgattatcagcttgtcttggccggtgcacctgccattgctcccgagtattataaacaatatgtaggagaagcgaaagtgaaaatcattttcgatcagacttatagcctgttgcagcatgcagatgtagctttagttacttcgggtacagctacgcttgagacggcattgtttcgtgttcctcaagtggtttgttattacactccgatcgggaaagtggtttcttttttgcggcgtcatatcctgacagtgaaatttatttcgttggtaaatttgattgccgaccgtgaagtagtcaaagaactggtggcagatacgatgaccgtgaagaatatgcagagcgaattgagaaatatcattgaaaatgaagcatatagaaatgagatgctttcggggtatgaatatgtagccgaacggttaggacctgccggtgctccccgtcatgcagctcgtgaaatgctgcgtttgttgaaaaaataactttctttttctgaataaacgtaaagccgatgcagtaaatgcacggcttttttatttataaagcagaagactaaaataatgaaaggaaaaagatatgaaaaaatttaagtggcttttaggaatcttattattggcattagtgccaatgttgcaatcatgtgatgatgatggttattctattggagatttcagctgggactgggcgactgttcgtgcaaccggtggaggaggatattatttggaaggtgataattggggggtgattgatccggttgctacttctattccttggtttaaaccagtggacggtgaacgtgttgtggcttttttcaatcctttgtatgacatggaaggaggaaaaggagttcaggtgaagatggaaggcatacaggaactgttgacaaaagaagtggaagatatgtcgacagaggaagaagcggaagaattcggaaatgatcctattctgatttatcagggtgatatgtggttgggaggaaagttcctgaacgtaattttccgtcaggagttgcctcgttcggagaaacatcgtatcagccttgtgcaaaataagatggaaccgggagagccgggcgaaccgtcagaaccgggaacattgaatgtggatgaagatggttacatacatttggaactgcgttataatacatatgaggatgtgactgactattggggatggggacgagtttcttataatctggaaaaattcttccctacgccgaaagattcctgggtagcacccaaagggtttaaggtgacaataaactcaagagaacatggagaaggaagagtgattgtgcttgatctggatcatccggtcggtgtaccggaagcagcgaaggatgttcattccacttcttcgatccgataacctaactatgatttactgtgtgtgaaaaaggtcgggatacttccgtagaagttcccgaccttttgtattttgtttcagctctaatcgattgagaaagaatcccccgttagaaccatgttaatgcatatagataaacgactgctgccggtatagccatcagggaactgtcaaagcggtcgagcatcccaccgtgtcccggaagaatggttcccgaatccttaacgtgcaactggcgtttcaataacgactccgtcaggtcgccccatgtgccgaatataacaaccaccaaggccagtcctgcccattcaatcattgacataaatgggaagtagtgagcgagtataaaagatactccgattgctaccactccgccgccgatagaaccttcccatgatttcttgggagagatacgttcaaataaccggtgtttgccgatcaatgaaccgatgcaataggctcccgtgtcattcagccaaaggaaaataaagatagatagcggtaggataggattgtaacttacgctactgtattctgatcccggatcgttatggaatgctaatacattcagcaaagcaaaaggtagtccgatataaagttggctaagcatagaataagcccagttaagtaccgggttttcctttttcagatacaactcgctaatcatcatgtaaagcaataaaagcacatacgggatgaatatcttcgaatcggccgcatcaatgcagaatcccatgattgcaaggaataggtaagccccgccgagcatattaatagtcttgtttatcttcactccttctgcgcgcatatttaccagctgtccgaactcataaatggtcagtgcgctgatagcggtaaacagaataccaaagctgaatgcgtcataaaggatgccccccaccaagatggcaacgaagagtacacccgtaatagctcgttttatgaaattattaatcaaaatctattcgttttaattagttggacccgttagcttcttcttcattggatttaccctctacggtaactttgccctccacagtaacctttttaccttctgcggcaactttggtgtctatgggtgcttgtttttcctttgcggtattttcagcttcctcttctttgatttctttttcttcttctttcagcttttgggcaagttctctttcagctcttgcggcatcctgactttctttagcagccatgatttcttccgaacgggaagcccaagggcgtttaccgaagatgcgttcaacgtcttccgcgaagattacttctttgtcaatcagtaattgcgtcagttcgttgtgtccttctttattctccgacagaattctcttggcacggtcatactgctcgtttaccattctcttgacttcttcgtcaatcaattcggctgtcttttcgctgtatggacggttgaaagaatattcatcgttgttgtaataacataagttcggcagcttgtcgctcatacctaaataagcaatcatgccgtatgcctgcttagtcaccctttccaggtcgttcatggcacctgttgagatgcggccgaggaataaatcttcagcggcgcgtcctcccaaagtagcacacatttcgtccagcatctgctccttggtagtgatctgacgttcttccggcagataccaggcagctcctaatgcacgtccgcgaggaacgattgtaactttaatcaatgggttggcatattccaacaaccaggagatagaggcgtgtcctgcttcatgcaaagcgatagagcgtctttctgcttccgttgtaatcttggttttcttttccagaccaccgatgatgcggtctaccgcatccaggaagtcctgcttgcttacgaatttctttccgtggcgggcagcgatcagtgcagcctcattgcagacattggcaatatccgcacccgagaatcccggtgtctgacgtgccagcaagtccacatctacactatcgtctattttaatcgggcgcaaatgcacgccaaatacttctttacgttcgttcaagtcgggcaggtccacgtgtatctgacggtcaaaacgtcctgcgcggagcagtgccttgtcgagtacgtctacacggttggtagcagcaaggataatcacaccgctattggaaccgaagccgtccatttctgtcagcaactgattcaatgtgttttcgcgttcgtcatttcctcccattgcagggttcttgccacgggcacgtcctacggcatcaatctcatcaataaagacgatacagggagctttttctttagcctgtttaaacaagtcgcgaacacgggatgcacctacacccacaaacatttccacgaagtcggaaccagccaatgagaagaaaggtacattcgcttcgccggccacagctttggcaagcaatgttttaccggttcccggagggcctaccagcaatgctcccttgggtatcttacctcccaaatccgtatatttctgcggttcctttaagaactctacgatttcctccacttcttgttttgcttcggccagccccgctacatctttaaatgtaatcttgatggctccgcctttttcaaaaagctgggcttttgattttcctacattaaatacgccgccggggccaccactgccgcctccgctcatacggcgcatgaagaatatccataacgcaaccagcaagacaagcgggagtacctgaatcagaattgcggggaaaatatccgatttgggcggatagtcggatgaaccgtcaaaatgaccggcttccttttctgcctgcaaaaactcttccagtttatcggtagacggggttctacttgtaatgacagggttgcgtcccaccttggtagagtcggctccaaaaacagcccctacggcagtcggtttgaggaaagcttcgattgatttatcttcataacccaatactttgctgacataacccttttttacatagtcctgaaactcgctgtaagttacagctttgcttcctgctccttttgaatcactgccccaccagaggccgagaagcataagggcaataatcatatacatccagttcaggttgaacttgggcatattaaccttattgttaggtttattgctattgttattattgctattattattgtccataatcattaattagtctagatcggggatttgagtaagtttggcatctgcccagaggtgctcaagattataaaaagctcttgtctccggcaaaaaaacgtgtaccaatacatcggcatagtccatagctacccattctgcatttcggagtccgtcgattgcataaggcttgctgtccgcacctttgcgtgtaaattccttgattgaatctactattgcactcacttgactgggagaatttccctgacagataacgaaatatttacagatggtatcttctatgctggttaaatcggcaacgactatctttttaccttttttctcttgaattccttcttttattttttcaattaatactttagtatcgttcattcctgtaattgggattaataattcatgttctctatttgtttataacaaaaaaaggtgaccctttgtttctgataataaacgtgatatttttgacaaatatacgctgatttattggatacaagaaagttatccctcaatttttgtgttttttagtggagatacttttgtttggaaagcttatttggacatttttgcaaaaaaaatatcggatttgttttgaattcccaaaatatttgtatctttgcacccgcaaacgaaaatcattgggctatggtgtaatggtaacactacagattctggtcctgtcattcctggttcgaatccaggtagcccaacaaaacaccagctttttactgacaaaaacccgctaaaaatgcaattttagcgggtttttttgtgctttgacaaataccatccgaaaaaagttgacgctaattcggtggctaattcggtgacacgaatgctcttttttgatatttttttgagtggttctcaaaaaaaaataacgatgagccaaaaaaagcaaactttcaatgttcttttctggataaggaaaggaagaacgaatgaaaaactgtcacctctttcatgtcgggttacgatttcgggacaaagatacgaaattcccacgaaactatacctacggtctgaatcatggtcggcagttgcgcaaaagtcacttggtaagaccgccaatgacaaagaagccaaccggtatatcgaagatttgaaaatcacgatcgaagataccgttaccaaaatcagacagaaaaactaccctctcaacattgagaacttcaaactcatgtttcagacacaggataatgagttctctaccatcagcacactgtttgattaccatgaaatcatggagaagaaaaatctccgtgccagtacatttgtcggctatcacgtaacgaagaaacacctgctcaactttatacgtatcaaataccatgtctctgactatgatttgaccgccattgacaaagctttcgtttatgagttttacgcctatctgcaaggctataagagggaaggggagaccgtatgcgctgtcaatggtgcattgaagcatatccagcgtttcaaaaaggtgatgaatgtcgccctgcaaaacgaatggataagccggaaccctgtctgcctgctcaacgccaagaaaacgaaagtagaaagaggattcctgtccgaaaaggaactgaagagcatcgaggaagtccctttgcccgtcaacctctccatcgtgagggacgtgtttgtatttgctgtctacaccgggctgtcatttgtcgacatcagtaacctgacgaatgaaaatataaatgtcggtatcgacaaaagcttgtggctgaactactatcgtcagaaaacggacatacacgccatgctgcctttattgcaacctgctgtctgtatattaaagaggtatgaagcataccacaaaggaaaacggactaatcatgtattcccggtaccgcccaaccaggtggcaaaccgatacctgaaaaaagtggccaaggaagcgggagtagagaaaaatattaccttccacatggcgagacatagaaaattttatttctcgctaaaattcaatagcttacaaaatatctcggcttaataggtaacgatttggaaaccagcaaaattctgtatttcacttcgttttgcagtaattcaaaagaacgcttctttcaatcgcaaagatagtatttttcttcgttgtagccaacacttctatcccccaaagctataaaaacaacataaaataacgcgagttatgagtcaaacggttcaaatatttgcatccacacataacgtaatcacctcagacatagttggaaatcaaaataaatttgtaactttgctctctcagctttgctatcatattctgattaagagaatggagcatcgtagtcgccacagcgagctttatttcctcttttttgccaaagatacccaagaaacctttccgcttcgtttttttaggctgttcttgtatgcttctctgcacaattacaggcacttgctgtgtcatcttctcattgatggtttgttgctcatcgagcaacgtaacgataccacgcatctgtagttctttatcttcgagaagatggcgcacactgtcaatacgttctaccgggtaaatagttctgaaacgacacagcatactgtccattgccaaacgctggatatgataatgttccaaatcatcgtcattccaatccaatacggtctcacccaaaagagaaaactctatcaggtgaatctggatttcatttatctctttcctgaaattgttaatttgtttgttaccagtttctaatgtctctatttcttgccattcattgcaccaaatatatgctattcccactaccaatagaattattagagtatggcttgatattattactttatgtacaaaatccatttgcttttctatctgtttttaacttctaccacctcccaacgcgtgataaagtttgatgataccctgtatgcggtcaaagcaagtttgtaactgtactgtttctgcttcaaggagcgactgttgggcagttaatatctccagataggtagtaccggaatggcgcatcagcagttccgtcttgcgcacagcttcacgcaaggtttcaacctgccgggtgtttatctcatattgcgacttagccgtctgccaggcggttaaggcatcgttcacctctttccccgcgttcagcaatgattgttggaataatagtttggcttcttcctgtttagtttgggctatcttcaagttggcgatattcgcaccccgattgaataacggttgcgtcagggaaccgatggcgttgaacaaccattgttcgggattggtgattgctccgcctccattgttggtccaacccaatgtgcccgaaagggtgatattggggtagaaggctgagcgggctgcatgggtggcgtaaaacgcttgtgccagttccatttctgcctgacgcacatcgggacggttggcaagcaactgcaaaggaactccgatagagatggtatcagggaaggatgcttcaaccaaattactccgctcaatcgagtgtgacggcatggcaagtatcgcagacaaggcattttctgtttcagagatacttttgcatatagccagttgcgatgattcaagttgcatcacgtttgcctttgcctgcaataccccggcttcattcgccttacccacctttttcaacgcttcaagcgtgcgcacggtagcccgccagttttccagagtccgattgtttatcgtcctttgcgcatcaagtacgacgagggtatagtaactatctgctattgtggagacaagctgtgtctgtacggcttgctggtagtcacggcttccttgcagtgcggcaaccgcaccacgctttgcaaccgtgagcttgccgaatatatccagttcccaacttgcggtcgccccgacatgatatgtctttgcggttgtcccgtcataacggctgtctccaccttcggcattcattcctaatgaggggagataggatagtttggctgtcatcaaggtggcttcagccgcttcaacccgcaggcgtgccacgttgaggtcggtattctgttgcagtcctgtttcaatcagggactgaagtttccggtcggtaaacatctctcgccatgatagggaggcgaggggtgttgtatccatatcttccgggatgttccgatacagattctctgtcgggatgtctgcccgatggtaccggctgtatgtgccacaaccggtaagcatcaaggtggataatataaatatggttatcttcttcattttatttacgtttcactcgttcttgaatgtattgaaatgtgatgaacagcgacggcacgaggaacagcaatgccaatgtgcccactgtcatgccaccaattacgcctgtggcgagcgagcggctaccgttggcacccacgccatgagccatcatcagcggaataaggccgaacaccatcgacaagacggtcatcaggatggggcgcagacgaacctttgccgcactgtatgccgcctgtgccaacgtcatgccttccgaccgtcgcttaccggcatattcagttaacagaatggcggtcttggcaagcagtccgataatcataatcagtccggtctgcatatagatgttgttctccagcccgaacagccacgcgaacaggaagctgcccatcagtccgcagggcacggacagcagcacggcaaaggggatgaacacgctttcgtagagggcgcaaagtatcaggtatatcaggaccatgcagagcacgaatatcaatgcggcattgttggtggtcttgctctcctcgcgcgacaaacctccaaactcgtagctgcaagtggcgggaagcacctcacgtgccgtctcgccaatcgccttgatggcctgaccggaactgtagcccgatgccggagaaccgttgatggcgatggcattgaaaaggttgaagcgcgtaaggtcggaaggtccgttggtcttggtcaggcgcacgaactggctcagcggtgccatgctgccatcggaagtacgcacgtacatctggttaagcgactccgtatttatgcggtactctgccggtgcctgcatagtgacgtgatagagtttggagaaacggttgaagtccgatacatacgacccggtataatacccggaaagcgtggacagcacatcggcagaagatacgcccgactgctcgcatttcgccgcgtcgatatccacccaatactggggatagtcagcggcaaaggatgaatagacctcaccgatttcgggacggcgggacagtgcctctacaaatttatcagcctccttcttgaatgcggcaacgtctccacccgttttgtcctgcaaatagagttcaaaaccgttgcccatgccgtagccggcaatcatcggcggcgacatggcaaacaccgtggcatcgggaacatcagtggtggcggcataaatctttcctatcacgtcgtctaccgattgcccttcgcccttgcgctggtcccaatccgtaagtatcatgaagtacatggcctgcgacggaccggaaccgctgaatgaaaatcctgccactgctccgctgtattcaatctcgccaatactgtcaagacgggcattaatacgctccatcaccttgttggtctgcgtcatggaagagccgggctttgtgttcatgcttaccatcaccgtgccggtgtcttcctgcggaataagtcctgttttcgtgatattgaccagcaagaccagcaacccgaacgaggcggcaatcgttccccacagcagccatcggcgatggatgatatacagtaccccacgcacataacggcggctcagacgctcgaatacggcattgaatgccttgcggaagcgtgccgcgaaattgttcttcgtatttccgtgctcgtcgatataaggtttcaggaacaaagcgcataatgctggagaaagggtgaacgcattgatagccgatatgcccacggcaaccgccatcgtgataccgaactgggcatagaacgccccggaggtgccgcccatcattgccaccggaataaacaccgccataaagataatggtagaggtaagaatggcggacgaaacgcccttcatggcatcatcagcggcaagcaccggcgaccggtagccctcatcgaacttcgcctgcaccgcctctaccactacaatggcatcgtccaccaccgtaccgatggcaagcacaagggcgaaaagcgtgagcaggttgatggaaaagcctatcagcgacatcacggcaaacgtaccgatgatggagacgaagatggaaaccgtgggaatgagcgtggacttgatgtcctgcaagaacacatacaccactatgataaccagaagtatcgcctcgataagcgtccgtatgacagaattgatagaggcatacaggaacttgttggtatcggtcagcaccacgaactccgccccttccggcaggtcgcgctcaatttcatcgagcacctcgtgaatctcattgatggtgcttgaagcgttggagcccgctttctggttgatgagcatgatggcagccggatgtccgctcacctcggtggaatagttgtagtattcatcgcccaactccacgtcggcgacatctttcagccgcagcacatcgcccccgggcagggacttgacgaccagctcgccgaactcttccgctgtggagaggcggccgcgatacttcatcgtgtattcatttgccgtggggtgattggctccgaacgaaccggttgccgcctcgatgttctgcttcgccagcacggaggaaatgtcgtcgggaatcagcctgtactgcgccatcttgtcggggcgcagccagaggcgcatactgtagttggagccgaacagttgtgcctttcccacaccgccgatacgtttcaatcgcggttccacgttaatcttcacgtaattgttgagaaaggtctggtcgaaacggttgtcggggctgtagagagcgaatgtcagcaactcggcgttctgctgcttctcggtggtgacgccggtcttggtcgcttctgccggaagctggctcaacacgccgttgacgcggttctgcacattgaccgccgccatgtcggcgttggcaccctgcttgaaatagatgttgatggaagcatcgcctgtattggatgccgtggaggtcatgtaggtcatgtcctccacgccgttgatggcctcttccagaggaacaatcacggctttctgcaccgtctcggcatttgcgccgggataggttgcccatacgttgatggtgggcggggcgatgtcgggatattgctccacggggagggcttgcatggcgataacgcccatcaggacaatcaccacggagatgacgcccgaaaataccgggcggtctatgaagaaacgcaggttcatggctttgtggttttaggtgtgacaatcattccttcctttagctgccccacaccttcggtgatgagggtgtcgccgacggacaagccctgctctacaacgaagtggttgccgtcgttcaggcggtccacggtcaggtaggcggcttcggcctttccgtttttaaggcggtaggcgataatcttgtcctgtagttccacggtggcggtcatgggaatcaggatggcatccgtatccagcacttgcaggatgacgttgccgatggttccgctcaacaggtgtctgttgacgttgggaaacagggcctttatctgtacggcaccggtcgtggaattgactattccgctgatggtctctattttcccttgtttcccatagacggaaccattgttaagttggaggctaatcggaggcatttcgcttatgattctgtcaatagaaccatatctggcctcgaactgcctaagtttgttttccgaaatggagaaataggcatacatctccgaattgtccgacactactgtaaatggctgttcgatggtgggaccgacgagtgcgccgatgcggtaaggcagcgtgcctataaccccgttgctcggactcttgatttcggtgtatgacaaatcgttccgggcatttgcttcctgagcttttgcttgttccagctctgcctgtgccacggctaattggtttcgggcaacagacagttcgtaatcggatatgactttttcatcgaacagcgactgtttgccgttcagctcgatacgcgctgtttccacttttgcctgtgccgcgctgacattggcgattgcgatgcgtagcgcagcctgatagggcgtttggtctatgacagccagcacttgccctgtcgctacttgctctccctctttcacgcacaggcggatgatgcgacccgatacttgaggtatgatgtccacatcctgtcgtccgcgaatcgaagcggaataggtttcttccaattcaatgggttgggaagaaaccaccatgacgggcaatgcctgtcccgtttcctctccttgctgttcctgtttgcaggctgccaatgaagcagctagcagggttgttgccgtgatgccggcaatccatgttcgtctattcatcatctttgtctgttacttttccattctttatttagtaccgcatagatgcaggtgtcctcatagcgtggtgtgccgtcgggatgacatacaaacgaaataaattccttcatacatccttcatgtctcattccgagacgtttacacaatctttttgaccgccgattatcgtcttctacaaatccatagatacgccgtgcgctgatgttatggaaaagataatccagcagtcctgttgccgcttcgtatgccaatcccttgccttcaaagcgttggttgaaatgccagcctacactaaatgtgtcggtatattcgcgcaaggcgaaaacatcaccgataatggaatcgtcttccttcagacacacggcatagcgtagcatatccttaggcgaattggatatataagccagtgccgattcttcggagcacaggcggtcgccgacaaaacaattgacacgcggatgggaaaggtattccaataaacctgcggcatccttcttctggaagtctctgatgatgagatgttctgtttcaataatcatattatcacaaattttgggtgcaaagatattttgtgcccattgtgctgacaatcggcataccatcgaaacggagaaaactacttccgaaacgacgaaagcggcttccgaaatattggctaacgtaggtcctaataaatcatagttgtgtatctctaagagaaattaccgttcgtttcgatactcattttatccatttcaaatacggttttatctgtttcagcctatcttatccagtcaaatgaggagtaaagtattatctttgtggaatatgaagtaactttgcatgaggtatggataaagggaaaaagattaactggaagaacggtcttctgctctcggccgtctcctatctattatatatcatcatttggttggttcttgattacgagaccgcccgtcagttgccggaaatggcactgatagattatatggtggatttcctgctgtgtatgcttttcacatacacctcactgggattctgttatatcgtgttcaatgtgttcccgttcaaagcctcttatgtcagggtcatcgtatatgcctcgtgcctgctgatgctcaacaatctggtggctttcggtatgatctcactttttaattttctttggagcggaacagggaatagtgttcttgacgaacttctcaacatgaaaggcgcatatacttttgccatgatagccaccttcctgtcaagtgtctatgccaatactttctacttgcaatcctacatcaaggcacgcgacgagaagcaggcgcttgaaatggcactgatgaaggaaaaggaaatcgccttgcagtcacaactcaactccctgaaactgcaaatcaacccgcatttcatgttcaacaacttcaacaacctgctggagctgattgaggaagatgcggggcttgccgggaagttcctgaacaacctgtcgaaagtgtaccggtacattattgtaaatttagaccgggacctgatacccgttgcagacgaaataaggttgctggattcgtacctgtttctgatgaaagtacgtcacggcggaggtgtcattgcgaaaatcagtccggaggtcaaggaatgtaagggatttctgcctcctgccgtgttgcagcttcttgtggagaacgcaataaagcacaacggcttctcaatggagcatccgctgtttatttctattacatcatcggagaactacattactgtgcataatcttaaatctcctttgctgtcgcgaatggaatcaacgggtttgggacataaaaatatcatggagcggtacgccttgctctgtgacaaaaaggttaagatagagaataccgaaaacttctattcggtgagtttacctatcattaaaaacatcatgacacatgaagatactggttcttgaagacgagcagcgtaacgccatgcgcctcataagactgctgaacggtattgacacaacgttcacaatcgaaggtccactggcaagcataaaagagacggtcgagtttttccaatcaggcaaggcggcagaccttatccttgcggatatccgctttaccgacggcctgagtttcgaggctctgaaatacgccccggcaaccgtccccatcatattcaccaccgcatacgatgaatatgcggtacaggctttcaagttcaatagtttcgattatctcctgaagccagtggatgccgatgagcttgaagcagccatagacaaagccatcaaaacaggcaggaattatgccgacgagaacctccggcagcttttcgatgccttacagaagaaccaattccgctatcgggaacgcttcctattgccctatcgtgacggctataagacagttcgtgtctcagacatcaaccacattgaattggagaataaaaccgtttacctccgcctcaataacggaacttccgaagccgtcaatgtgtcaatggacgaacttgaacagcaactcaacctggactgttttttccgtgccaaccgccagtacatcatcaacgtggaacacgtattgtttcttggcaattatttcggcggcaaacttattgtccgcttgaaggggtatcctgacacaagaatcacagtcagtaaggagaaggctcaacggctgaaagagtggatagacaggtgaggcctaaagtgtcttcttcgaatttattccttctgttgttcccatttggcatacatttcccttgaaagttctactatctcccggctcagtttcacaaggtcgatggtacacttctccaatcggtatagcaatgccatcgccttcttctccgaaaagtggcagcgtaattctttcacgacttggttatagttcgtgccgatggcacggaactgggcatggaagtcggacagcttggtgcagtattccaacattgccttgtccacctttagcaccttgaatttctgaccgaagaaatgcgctttgaggaagacggcttttgcgtacacctgtgattcctcatacatcgtgaggaacttgttccattccacatcgtcgaagcgcaccatcacgcagtgcgtcttcggattcaatttgggatttctcccgtacttactggtctttttcattgtcttgtcctttttatttaatggttcatacatggtctaatctctgattaaaaaacttggaaattatccgactgcggaggataattctgcccacggcagtgcaaggattttcagttaccggaatcaaccggagtaactgaaaatatatcttgctgtgtctttgaggacacaaaaatcctccgcttgtcggattgggttgccaattcaataactcttcaagtgtatcggtcaaaccgatggagtgtatccaccggcttgatcggttccaccgcaatccgctcagagcttgcgccacagctcgatgtcctcccgataggtttcaaggtgcaagcgtacaagattctctaccatccccgatgcgctcatgcccctgccgccgaagtagtggactatcctgtccaagctgtcacgcacctcaccgctgacgaacacaggcttgcggtcggtaatcttgggaacttgcagataagtggttcggtactcgtccagcgacagcctgcgttgcttgctgctaatgcgcttctgcggcactgccgccttcccggacatttcacttgcgctttcttcaagcaccttattcgctgtttctcccgtcacggcggttcccgtccccgaagtgtcagaagcatcggtatgttccggctcgtccggttccaaacctatactcttgtagaaatcattcagggatgtcctgccacgggattccctgcggctcattctttccacgatttcctgagcttgctgttcactgatggttggttctttttttgttgccataaaaacaaattgattaagttattactgtggtcttggtcggtaccttgaccgattatcgccagcgaaataaggtgctttagtgcagtcagtcaagcgtttggattcgattcggctattttgtgtgactttgcttaatatctgtccggacatcggtgcggacttcaccgatttgccggatataaataacgtataatagcaaagcacaatcacggacgaatttgaattaagcccttatttggaatgaaacttctttattaaagataagaactaagacagaatagaccgccaatttacaaagcgtatcccggacaacctctgccgtatcggtgccacaagctgccatttccgaaaaattcattgtcggataacgcattatatattcctttgcggcaaaaggaacaataacatcaaagaaaaagcatatggaaattgtatcaatcgaaagaaagacctttgaggcgatggtcgcaaagttcgaccgttttgtcagccgcatggatgccatctgccagcggcacggagagaagaagatgggcgagtggatggacaatcaggatgtgtgtcgtatgctcaacatcagcccgcgcacgttgcagacactgcgggacaacggcacgctggcttactcgcagataaaccacaagacgtattaccgtcccgatgacgtacagcgtattgtttccgttgtggaggatagacggaaggaagcgaaattcaaaggcagaacaatataatcaccaagtatagtaatcccactaaatcccaaaaatgtatgaatgaactaattaacaaggacaacgcgtggataatccatttcatgggcagcctcgaccgtctgctggacagcttcgagcatctgaccgccaactatcgtccgacattgggcggagaacgtttcttcaccgacaaggaagtgtcggcacggctgaaaatgagccgcaggacacttcaggactaccggaacgaagggcgcatagcctatatccaattaggcggtaaaatcctataccgtgaatccgacatagaaaagatgttgaatgacggctaccgctccgcctatcggctgacaggtacatgattttcttgaaggagcgcagtttgccgtctgccctatgattgcgccagcaacggactttcggcaaaaagaaaaaggaacggtttacggatgaagcgtcaaaatcctgcttcgtctgtaagccgttctcttttttctatcttctgatttcccgtcagtcgcttgtttccgttgccggatgcccttcaagcgtatggctggcagcggcaaggttttcgggctgaatacgctccacaggaggaagattctgcccgaaacggctctgccgcctgaccttgccgctgccatcaaaccatgcgctacctttgcatccgtgcatcgggaacgagtggctgacggaatgaacctcaactataccatcggttattacctctgacgctggcaacaaacagtgtaatcggtgtagctttcttaatggtgctaatttcatttattataaactgtctgaacaagacactctctttactgcatatcctgaatgcaacggctataatcacttcaatgttatagacatcgtaactgatgccatccggttgcttgagatacttcaccgtgtcaaattcgttcagttccttgttcttgtaaatggtatgaatcgctttgcggacatcgcatgagaatgttccgaataggtcggctatctcaaattgtgtcatccacacgggtgcggtcggcataatgaccacacccttttcactgattgttattatacctctgttcataatggggtgatttgatgtttgttattttcgctgtttatcttttcgccggccgatattttctttctccgttccatcaacttgtccatgtccttggaaatcttgtcatctgtgatttttgcatagacttgggaactggtgatatttgtatgtcccatcatcttggcgatgctctctatcgaaatgccagcggaaatcaacagggttccgaaggtgtgccgggcttggtgatgggagagattttcttcaaactccagtgcgttaccgatggaatgcatctcatgccaaagtatatcacggatgggcaaagggaaaacggggttggtatcatcggtcgtgttgtaaagcgacaatatacgctctgccacgggatgcaacggaacaaatgcttccacgttggtcttacctctttttttgcggatatatttcctgccgtccgcagcctccccgatatggtgcggatagagcctgtgtatatccacatacgccagaccgcagaaactcgaaaagataaacatacgccgtgccaattccatgttactgtcctcaaacggagttgccatcaggcgtttcaattcgttacggctgatatgtttcagctttggaggattcttcttttcatattccacgtcctcgatagggttggcacgtatgatttccctgtccactgcaagatacaacaacctgttgagccagcacaggcacttgttcatcttgtctgtgctgcatcccaagtcctttaacaggaatgtcttgtaatcgttgccgaacccttccgttatttcctccaacagtatatcctgcatgtcatacaccgattctatgtacagcctgatacagtcctgaaagataatggattgtcggtaagtggagcgtgattgtatctcgacagagcgtttcttcaacctctccagctcttgtttgcctgtttgtaacagggttgtgagcaaggagctttccgccactatggtgtttttcagcaattccgcactgacaacaccctgttctttcagtatggtgtcgtatgtatctttaatgtgttggcgatattggcttaaccgtccgtttgtgcgaacgtcctttacctcgccctttttactgttccaatcatctggattgcaataaatacccgtggaaagcaccgcctgtttgccatctatggagattctgcaccaaatggcggtcgtaccatcagctttcaccttgttgcggttaatgtaatagagttgtttgaatgtactgcgcataactgattatcttattgaacttgattaaatagttgtatcagagaacaagcaccaagtctttggtcgctgcgataaatgtgtccatgtcctcaaaaagtttcttcggggtcacacgggcgtaaatttgcgttgtctggatattggtgtgtcccaacattcggctgatggtttcgataggtacaccctcttcaagcgttatcaggcttgcgaaactatggcgtccgacatgatagacgatatcggttttgattcctgccagtacacggaggctcttcatgttggctctcaacacgcggtagtcctgaacaggcagaagtgtttcccgtgattcgtccttgtatttgtccaatagggcaatcgcttcgggaagcagtttcacccgtgcgaggtactcgtttttcttgcggtggtatttcagccacaggttcccgtcatcgtcggaaaagagattgtcccgcgtgatggacacggtatcggcatacgctgttccggtgtagcaggcaaacagaaacaggtcacgggtgagggcaagcgagggcctgcggcgcacggatatttccacgtcacgtactttcacaaactcctcccgtgtgagtgccttcggtgcgctgatttcctgtttcggcagcttgaagttgcagaagaaatagcgttcggaatgtccctccttgtaggcgatgcggcataccttcttcaaaagggcaaggtaatggcgcacggattgcagggattgtttcttctcatcgagcacatagtcctgaaaatcccagatgaaccgctcgtaaagttgcccgaaggcgacatcctccgtcttgaatctctcacggatgaaccctgcgagaatctgccgtgtgtagtaatacttggagtatgttccctcggcacggtcgatgcctatacgcgatttcaagtcctcgttgatacggtcaaactgtttcaatagggtcatctgcttatccatgctcccctgaaacatgtccttgactgccgtagcgtcaaactcctgcttgcgccccaacagagaatcaaatgcggaattgatggcaagcagcagtttctcaatcttggcgttggtttcaaccgcctctttgctctttccgttcagacggctttcacggggattccataattcgggagtgcaggacagcttgcatccgaactgtgccattgtgcggtttaccgtgatgcgccccatgatgggagcctttcccgatttgtccagtccgctctttttgaggtagagcaacaccttgaatttttctactttcatacgcttatattttttagtgcaaaattacttgccgtataagcgttccttgatatgcaaaatattgtgtatgagcgcaaacaaaacggtgaggatttcttttcattgcctgccgttacctattcctgtttcggtaactgcccagctaacggtttggtaactgaacaacctcaatatttcgttgtcatttgcatttttccaacttggcagaacactgaaacaatgctcatttcaaacggtttacgttttatctttacctgttcgcttttccttgcacagcctatcactttccatcagagccgacacacttttgccaccactatcaccctgtctcacggcataccgattgaaactgtgtcaaaaatgttgggacataccagcatcaagacgacgcaaatctacgctaagattctggacacgaaagtcatggacgacatggcggctctcaaagaattgtacaccagaaaggaatctcaaaaatcacccgataataaagccgtaaacggatgaaaacaaccgcaaccatcagccaggaagaactggagcagaaagctgtcgatagcatgatagcatacgagaagaacctcatttccggacaggaaatgaaggaagcagtcacccgtgcgctgcatcactacgccaacagggaaggacaccgggaaatcgttctgaaagggtggattataaaaaccatctacgccctcgacagcagccaactgaaagacctcgaccgggtagctttcacctgcatggataaacagccggttaacccctgataattaactcacataaaaaacaaaatcatgaaaacagaaaccaacagcatgagaatcgtgaaacctgaaaaggaatctgaaaaagcagtcgtggaaccccaaaaggagaaagccaccggaaaaccgaagtacaaacccgtggaacccgtcacactcgaaactgttccggaagatgccgtgttcatccgctccacggatgtatgcaaattgctcaacatcagcaactcaacgttaaggaacatgcgtgcggagcacgcaatcccattctacaaactgggtgggatatttctctacagcaaagaagaaatcatgaattacctcgcatccaattacagtagaagaatctagcgaaaatggcaaaaacaggattatcatattatcaggcggaaaccgaccgctttcaggacatcaaggtaaaacgtctgaagaagcgatacggctgcgaagggtatgcagtgtaccagtatatccaaaacgagatataccgggttgaaggctgttatatccgtttcacggacgaccagctttttgatgtttccgaatactggggcattgaagagcaacgggtagaaaaaatcattgaatattgcacggaagtggaattgttcgacaccatcacctggcatacgaatcatgtacttacttccgtagatattcagcagagatatctcgaaatctgccggagagccaagaagaagattgtaataccggaagatatacggcttgtcgagatacaagacgtggcttccggtgtgacaggtgcgtcgctacctcttttctccggtcaggaaattgagacgaaaaccggaaaaacagtttatggttctcccaaactggataccggaaaacagaccgcaaccgatatcggaaaagaaaccgtaatcactgccggaatatcttccggcgtcattattccgcagagttctgcggaaattccggaaactccgcggaattctgcggaaaaacggcacaaagaaaaagaaagtaaagaaaattccccctctatcccccggactattccgccggcaagggatgatgaggacaaagtttcactctctccggacgggaataggggaaatgtttccgcagaatcctgcgggaaacgtccggaacatggcgaagaatacagtttgaagttgcagcggctgggggaaacctgctacaatctggggtgttcgaaaggagatgtccgtaaggttctgatgatagaaaatattgccatggacgacagcccgatatggcaactgattgaagagttgaaggcgagcggcggacgttattcgttcaccggagaggtgttgcccgccctgtggggactggtgaagacggggcgcctgcggatgatggaagagcatacggatgaggtgaaagagggcgttcataacgtcaggcagatgctgtcgggtatcggcgtgccgagctacgacatggacgaattatgcggagaggcgaaaggcaaagaagatgtcctgcaagaggttatacgggaaatacgacgatcgaaagggcggattctttcggtgagctgtttcatcaggtcacggttgaaaaaagcgaagaaaaacgaattgcaaaaaacggcgtaagccacacagttatgagtgaagataaaaacaagacgccgctctactacccccgcaaaatgcgtacagggtggtgcgtggcgcacgaagtgacagccgcgggcgtcactatcgagagatacggaatacactgccagacgtatgcggaagcataccgacgggcggaagtgatgaaccagcagcaacaggcgcaagcccttcaaccagccaactctgacagcaagagagggggtgaacgatcatgagtgaaaaagtaagcacgatcaccttgcgactgacagccgaagaagccgcccaactggagatactcaaagacatcattgggaagaagagcgggagcgaagcgattaaatacgtcgtcaaggaatacccccgtttctgtacccactacaagcaggaagcgaaggaacacggagaactgaaacgaaagtaccgggagcagggcgaagccgtgcggggttttctgtcggcactcgacaggttggagaaagcgggcagggagaaagagtaggggaaacgattgctagcaaaatacgctccggaagatcttggccaatgaaatatttgctagcagatgtttccggatcgtgtactcgagctgcgtaaaagtgctagcggattcttgttcccggttcgttccggagcaactaatttgctagcaattaacggggatatcaggttgatggagccgggatcccgacaggtatgtgatagcaagtgaaggtaatgggcaagtgccgaaccaagcggattactttcgcgagcggcttatcgtctgattgctcaccgtgccgccgtgtggttcgtggcaatgcgtgcagcgggaataccgccgcccacacagccccgtcccccgcagcagcactccgtcagtgtttaatagcaatattccttcaccggcagcgtttctcggacgggcggtgtttctgtgcaccgtgccgctttccttgctttcccgtagccacccaatgggcgcaaagaaagccgccctctgacagtgtttctatggaacgttcttgggggaagtcttcccaaaagttactcctgtgtgtaacagtcgaggctggcaaagtgggtgattacggaagttactaccgcctgacgcatacggctccggcttccgctcacaccccggcacagccggactacaagcgacagcctatgcggtggaaacccttgcggaagggtatcccctgcggaacgggtgacagctgtgatgcccagtgcggtttcgctccgcccggcacttgctgccgggactaaggcgagaatccgctacctcttttcgtctgacaacaggaacggaagtgttagccaggagtgcagccctgcggtgcggggttcccgggtttacggttgagtgggtttgtattgtggaagtaagcacccttcgtcgtccttcgggcgcgtgcagacgtgatgctgcgtgcgccgtgacagcaattgttttccttccgtcttcctttttgggggacacccaaaaagagaccggcagaaaaacaaaggggtagcgatattcaacataacgggtcattatgcccgcacgccttgccattcaggcaagtcgggtgcataatgcgtggttatgtttaatatggattgttttatttttccgcccccaggcgaaaaaagccatgcggagtggaaacgccaccaccccgaccaccgccccttagttacttctgccactcccgggccgtgcggttttctgacctgttgcgggtgcttcctgcgggttgcgcctggcggcgtgcccggctaactgtttacacctttcggaacattggaaattcccggcggtcggcttcgccgtccgctccatgaagcggggcgaagcgccccgccgaagagtgcaaataacaaatccgtgacaatcgggcaaatgtcacaaaataaaatagtaaaaaacgtaagttctcaaaacttatattaaacagaatagaaatgaaagaatcacatacaggtattggtatctgccgttgctaccaatgccgaatgaaaaaaaagaactgcagcacatcgggacgtaaatcgctcaaacgggcaatcaacaagtttcgccgcaagcaattgaagttagacaaagtaaccaggcacaatcacttcggcggatattgggcctaagactaatacatgcttttatccgccccacactgcacaggaacacatttttttccttttttcatctacctctccaagggcatggatgaacggcagacaagaaatttcagataaaaataccgcacgacgtaggagcgcaggatatttttatctgaaatagcgtagcggttcttgactgacggacggccgtgacctatctttgtagaagaaaagaggaaaaatacgctgtaaaacagcaaacttatcatttatactttcccgtcactttatagataattgcgtttctgtctgtgtcattctgtttatttacggatagaaccatacgggaataaaacgtaaaaactcccgaaaacagccggaaaagaagcaaaaacgtacttgaaacccttcgagatgttttcaaaaattcatcagacgttttttttatttcgtcagacgttttttgaaaaactcctgatgttttctatgagactttcagaagcatattccgttcaccaaatacccgcaaatgaaaagcccggtgaaatgatttctcattcatcgggctttttccttggtttgtttgcgatgtacggaacgaggataatgcgctagcaggcgttttcttcgttaccggtcattgtttaagctgccgggtctggagcttctccgccgccttcgtcaggtttcggatttggtttctcatctcctccttcgccatcttcgttcgctgcgcttgctcctgccttggagaaagaatacattgaaacggcttccttgatttcggcagaaggaacatagataacacgtgcttttttcacactgcttgctccacacttgctggcatcctcggtgcctttaccggaaacggaaggacggaatgaaccgagatctcccaggcggacgggtgaaccgtttgcgaggttgcgcttgataacgaccatcaatgcgtcaagaactgccttgatgtcagagccggtcagtgtacaacggtctgcgatctggtcaacgatttgtttttgtttcatttctggagcgagcactacctgcgcatagtattttgctgcagcggctttgtcctgcggattcttgcgcaaagcgggtttgattgtaattgccatgttaattagtgttttaatgattaataatgttgcaaatctacatatacgtgcgtgggcgtgcggacgtatgttcttatctgtgatgatacgtgtttcatcatacgattatgtacatgaaaaaagggctgcggtttgtattccgcagccctccaaacaggggttttcactccgatcgtaaagtttactccttaatcgtttctcctttcatcgtctttcacgggactgtctgccccggtgagccaaacaaaaattttaccgataactttcaataccttcaacgtcgttctccaaaatggtttcataatgacctcctttttaattgtttcccgcaaaggtaggggaaatgaagaatgaagaatgatgaatgaagaattggctgcgctttcatacatttacatctgcatagtaattcttcattcatcattcttcattcatcattcttcattaaatacccgtattcgacggagacacagaagcaggggcattgtttgatgtactcgcagggttctatggtaccgttgtggttgaggtcgggcgagaggtcgcggtgaccgcaaatctttgctccgtggtaggtgagcagcaggaagcggagaagggtttcaaggctttgtttttgtgcgtcggtgcgggtgtcggcggcacgtccggaagcatccagacctccttcgtaggcaactcctatcgacggggtgttgtagcctttggcgtgggctccgatgtgggtgatgtcgcgcatgtggtgtattgttccgtctttggtgatgtaatagtgatagccacattcggcaaaaccttggcgtttgtgcatggagtcgagggcttccggggtgaggttgcttgtgcaaggggatgcggtgcagtgcaccacaatcagggtgatgtttctttgtttaatcattgttttttgtgggtgattatgtggatgatttttagttgtgtattcttgttctaccccccttccgtccccctttgggggagacgcttgtcgggggaagtgctcttcccccttgccgcagggcgttcccctagcgaagagggttcgggctgtagccgtaggagctgctgcactagggcttaaaagggtgagccgaaagagatggttatcagttccttttgtttgggggtgaggatgcggttacttaactggtagtttgtttcttgcaatgcttcgagtagttcggtgtcgtcctttatccactgtttgaggcggatagaagcggacgcaggtgcaatattcgggaaatagagaacggccagttctttgaaaccgtagctacggttggtcaaactttggcagttgttttgttggtgcatgttggtatacataattatagtgttggtttacagatgtaaagataggctttttagtggctggttgtcacctgtatacttggtagatatagttatatatgtttgttggcagaggaaatttgtgatattcgggcaattgtcacgaatttcttttgtccgtaacttttcggcggggcgtctgccccgcttcgtgaagcggacggcgaagccgaccgctgggaatctccgatattctgcaaagactgtccgcagggtgcaaacagtcagccgggcacgccgccaggcgcagcccgcaggaacaggaaacccgcaagaagtcggaaaccctgccggaaaccgggaaaggcaggagtaactaaggggtggtggtcggggtggcggcttgccgccacagtggtggcgtttacattccgcagggcgcagtccgtaagggtggacattaaacggagtaactttatgcccgttcctgaaacaacggaaaagcccgcaaacagcaggaatatttggaagatgctgttatgttgaattaaagcacaaaatccggaacggttttgtgactaattaaacataattgctcttccggatttcctgcgcaaaagctgcactccactagaaaaaccggaagaccacggcgctagcaacatcacgtcagcacggcggcgaaagctttcgacgcctctagttcaaacggacaaacccgctcaatcataaaacacgggaaccccgcaccgcagggctgcactcctgactaacagcccgttcctatagtcagacgaaaagaggtagcggattctcgccttagtcccggcgttagtgccgggcggagcgaaaccgcaccgggcatcgcagctgtcacccgtgccgcaagggcttacattccgctaaggatatcatccgaaagggtccccatcgcatagggtgctgcttcctttgctgtattcggcaagtgagggagcggcaaccggagccggatataagacgggagtaacttctgctatcgtccgcaagggtgtccaccgcataggctgtcgcctgtggtccggctgtgccggggtgtgggcgggagccggagctgaatgcatcaggcggtagtaacttctgtaatcacccacttggcaagcctcgactattatacaccggagtaactttaaagaaactttccccaagaatctcccatagaaacactgccgtagggcggctttctttgcgccagtccgacggctacgggaaagcaaggaaagcggcacggtgcacagaaacactgaacgtccgagaaacgctgccggtgaaggaatgttccgattaaacactgacggagtgctgctgtggggagcggggctgtgtgggcggcggtattcccgctgcacgcattgccacgaaccacacggcggcacggtgagcaatcagacgaaaagtttcaagcatgacttttttccagtttgctagcacatacctggcaggatcccggcttcatcaacctgttatcccctgccaactgctagcagaatccggcagccggcttcttccaggacgaaacatttgctagcactattcccgagctgcagtagttgatccggaaaaatctgatagcaaatctttcctactgcagccggggtgagctatacagccatcggttcctctttgataatcgagatttccagtgcgttttcaatcttggtcaaagtttcgagtgaaaggttctcccgtcctctcaacacctttgagatgtattgcgggctgcaattcattttttcagccaattgcttttggctcattcctaattcttccatcctgtccagcatcagcatggcaatattttgcgaatgtcggagccaagacttgtttgtttcaaggaagtcaaacagctcacgccatttcgaaggcgttggagaagcatgttcttcaagcctttgtgcgatagatttcatacgattttccatatcattcctcccaaattataattcactaatatactctataaacccttcgtcgtcaatgattccttcttcaagcaggtagcgtcgaaccctgtctattttcacaagttcctgcctggtgtgctctctttcctgcatcgtagccgtcagcttgatggcgcctccggtgatgatgtagttgccttgaatcaatttgatagcgtatagccggagccatgacgagtgaccgtatttacgttttaaccgggccttttctttttgcagcatcatatccgaagcctggttgttgtccagcgggcggaatatcttgcttaaatcggtttccggggagatgtccattatgatgtatcgaaggcgttcactatcttcaatagtatcgctgatagcttcttttatatctgttattttaaagtaggcgttcaagtcatctatattctccttgaagaaagtgcgtagccaaaccacgtcggcccagttgttgaacaccttataaaattcgttatcatcctcgccttcaaagtgtacagcccataattttctgtctccagtaatgtcgtcaaatgtcatatctccttgttttatagtaagacaaagatacgcaaaagtaacgagataataaacttataggttgattatttagcaagaaaaatgttttatttagttggtttagtggttgtatggtagatggtggtgtctgtgtcccagtcattaatttcatcattcgtgtttatttgcagactgtcaatgagagttttttgatgagttatttccggttgttcgcagcctcctatcagttgtataatgaatattattcctgctataacgattcctgctatggtattattgataacatttctttttaagcctttaatataagaattctgataccttttattttgcataatttatattttttacgctgtgaagttaataaattaaatgcgatatttatcattatttgtcactttaattaggtttatccgattaaaaacgatacctttgtattacaaaacttgaatcctcaatgggatattaaaagagggtttttgccaaagtcggtgtctaattcggtgacactacgaaaataggaagctgttaattcattatgaatgagactataaaggaattaaagtttgagggcaggtagcccaacaaaatcaacgtcaatttagatagaaccctgctaagaattagtttttgcagggttttattgtttccggacattcatagtcaagagaaacgcaaatttgctgtgaaaagaagctgtgaagttgatgtttaagaaataaatctttaaacaagctgtataagcttgtttagcagaaaagagaaacaggttttattgctcaagcgagcataaaacctgtttcttttatttctctaaatcgggcagaggattattcttctgctttaattgattcgtcgattactttaattttttgtaataccagttccaagtctgctttcaacttgtctaccttgcggttcagttcggtcaacaggctgctgcctttcttggaagtagaagttaggaagcccagattgttctcataagtctgaagttcattcttcatattctcataagtacgtaccagtttctcgcgttctctatataaagattgagtgccgcccccctggatattgctaatgttcgaacggaagttgcttaacttcttgttggaagcattgatgttgaaacggtcgaataactgatcgatcaatccgtgatattgcttgtatagcttatctttttctttgaacggcacatgaccgatagagttccattccttcatcaaatcccgaaccagattgcttgcttcttcggtatccatgttctcatcgatagcggataacttttcgatcaatgctttcttcttttccatattctctgtttcgacagagcgttgtgaagaagtggccttgttcttttgctcaaagaagtagtcgcaagctgtgataaaccgtttccagattgcatccgagtgttttttggcaaccggtccgatggtcttccattctttttgaagtttggtcagtgcatcggcagttactttccagtctgtactgtctttcaaggcttccgctttttcgcagagcgcttttttcttttccagattctcgttcattccttctttcagacttttgaagaattctcctttcttcttgaagaaatcatcgcaggcatggcggaaacgctcgaagatcttcacattcatcttttgcggcgcaaaaccgatagttttccatttgttttgcagggcaatcacttcctgggtcttgttttcccaggcagagaatgtttttagttcatcatactcaatcgcttcaacgatttcgcagatgacggtcttttgatccaaattatgctgttcggcttctttcaacgattcgaagtgctgctgatggcggcggttgacagcggtagaagctgctttaaaccgattccagatttcatcacgcagttctttggctaccggacctgtatcgcggaactcctgatgcaacttctgaagttggtggaaagcggaaacaacatcttcctcgtcagccaacttttcggcagcttcgcagagatgcgttttgatttctagattctttttgaagtcatattcgcggaattcattgttcagtttcaataaatcgtagaacttctctacatataattgatagtttttccaaagttcattcactttaccttgcggcaccagttttgtgtcattccattgctgttgcagcttcttgaactccgtataagatttgttggcgtcatctccggattccaccaattctttcagttcttcaataatggaaagtttcacttgcaggttttcttccttctggcgttccaactcggcaacctgtttactgcgtttttccttgataacccccatcaggcgtttgaattcttcttccgtcgggtcctcttcggcaacaaaatcttcaatgtttccaccgttgtctgtaaactgtaccttagcagcttccaactcggcattatgtaacttgtagaatgattgtttcagattgtcaatatcctgcttgttcgcattttcagcatcttgcgcaagctcttttagctggtttagtacatcttccttagtggcaggtttaggagctgcttcaggttgaacttcggcagtaacatcttcagccggagtctctgtaatagcttcagaaacctcgactgttttcttttcttcttctaattccccttggttcaagggttgattagtgtcatgagcgtccatcattgtatattagttttgggtcacaaattaatgaaataaaacgattacttcatactattttgcttatttttttttgtttatcgtgtttttatgacaataaaacggttattcccatgtacaacatcattccgatgatgtcatttgtaatggctataaacggacctgttgcaatggctggatcgattttgaacttctccagcgtcatcggtaccagtgtcccgaaaatagaagcgaacattaccacggcaaacaggctgatggatacggaataggtgaccgtagccgttgcgccgaacctgataaagttgtaggtgtatactaataaggagataatagtggcattaattaaagctactaccgattccttggtaatctgcttgaaggtatttttagcgtccagcgagctgtttgccaaaccctgtacgatgattgccgaagattgtgttccgacatttcctcctgtaccaccgattagcgggatgtacagtgccatttcgggatgggcagcaaaggtggagtcgaaattacccaatatcatagagttgccgattccgccgatcataccgattaataaccaggggaggcgggcggtggtctgtctcaatacattatcgtctgtttctacgtcctgcgaaagaccggatgccaactgatagtcacgttccgactgctcacggacttcatccatgacgtcgtcgacggtgatttgtcccacaagccgaccgatactgtcgacaacggggatagccaccaagtcatacttctcaatcgcctgtactacctcgtcaatgggagtatctacgtgtaccgaaatcggatctttctgcatcacgtgtttcactttcgatacagaaggggaagtaatcatctttttgagcgggaagatacctcgcagacgttcgtcatcgtcaatgacatatacataatagatttcgtccagttcttccgcctgttgccgcatctctttcagacattcgggcatactccagttttcgttgacaagtaccatttccgtacccatcaaaccaccggcggtattttcgtcgtatttcaacaagtcgacgatgtctcctgcctgttcgatgtcctcgatgtgcgaaagaacctcttcctgcttgtcttcatcgagttcacgcatcaggtctacggcatcatccgtgtccatgtagtcaacgaagcgtttggcgattgtctccgaaggaagcatttcgagcagctctttacgagcatcttcgtccatttcgacaagcacgtcggcggcaatttcgttatcgagcaggcgatagacgaacttagcctcttccgcattcaggtcattgcacaattcggcgatgtcggccggatggaggtcgatgagaagaccttttaccttgtcggcgtctttttgctcaataaggtgtttaacgttgtcaatgtattcctcgttcatcgttgtcaattacaaattacgaattacaaaatccagttctctgctcactgttgcccgccaattattgggcgttgccggctgtctttaatgcttcttccactttattggtcagatcgataaattcggctaccgatagttgttccgggcgtttattaaataagatgtcctccgtgagcggacaatctttgcctaaaataggtttgatggagttgcgcaatgttttccgtcgctggttgaaggtcgttttcactacttgcttgaacagtttttcgtcgcatcccaactctttagtctcgttgcgtgtcatacggataacagcacttttcactttgggaggcggattgaacacgtgttcgctgacagtgaacaaatattccactttataccatgcctgtatcaatacgctaaggataccgtatgtcttgctgcccggtccggctgcaatacgttcggctacctctttttgaatcattcccgtgcaacaggggacgatatctttgttgtccagcatcttgaaaaagatttggctggaaatattatacgggtaattaccagtcagtacgaaaggcttcccgtcgaacaaccggtgaagattcattttcaagaagtcatcctcgatgatgtggtcttccagtgacggataggcttcgcgaagataagcaaccgactcatagtcaacttctacgacctttaccaatcggtctttctttactagaaactgggtcaatactcccatacccggccccacctctaaaataggcagttcggggaaggtgtcgactgtatcggcaatatcttgcgcaactttcagatctttcagaaagtgttgtccgagaaactttttaggctttactaatttcatttaccaactaaataattacttttgcagctgacaaaggtaattcttttaaatgaagaacgtaccactatttattaaaaaataaatgatgtgtcagcgaagctaatgaagaattaaggatgaagaaactattaaaaaagacgctgaaactgatattaccggttgttttaggcggctttatcttattctgggtatatcgcgactttgattttacaaaagcgggcgatgtgttgttacacggtacaaattggtggtggatgctcttctcgttattgttcggagtgtttgcacaagtctttcgtggttggcggtggagacaaacattggaaccgttggacgctttcccgaaaaagagcgattgcgtgaatgctatcttcatttcatacgctgccagtctggtggttccccggatcggggaggtgagccgttgcggagtgttggcgaaatatgataatgtctcgtttgccaagtcgttgggaacagtcgttacggagcggttggtcgatacgttgactattctcctcatcacaggcatcactgtattgctccaattaccgatattcgtcactttccttcagcagaccggaacgaaaatcccttcattaatccaccttttgacttcggtatggttttatatcattctgttttgttttattggtgtggtgatacttctttattatttaagaaaaacgctgttcttctatgaacgggtgaaaggatttgtattgaatatatgggaaggaattatgtctttaaaaggcgtgcgcaacattcccctctttattttttatacactggctatttgggcttgttactttctccatttctattttacattctattgctttgcctttacggcacatttgggtatccttgcggcattggtcatgtttgtcggcggcacgtttgccgtaattgtgcctacccctaacggagcgggaccctggcattttgccatcatttctatgatgatgctttatggagtaaacgtgacggatgccggaatatttgccctgattgtacacggtattcaaacctttttggttgttttattgggtgtgtacggcttggctgctctgccgttcaccaatagacatcgggcgtaaatttttagctaaaagtgtatattcttacatgtttttgccaacctcctttgtcatctgaaaacttttccataacttggcactgtttaattatcagatttaaaatagttttaaaatatttattatgagtaccattctttctttagctccacagaacgtgtggaagcatttttattcgttgacacagattccccgtccgtcaggacacatggaaaagattacagcatttcttttaggtttcggaaaagagctggggctggagtcttttgtagacgaagcaggtaatgtgattatccgtaaacctgccactccgggtatggaaaaccggaaaggtgtgattcttcaggcgcacatggatatggttccgcagaagaacaacgatactgtacacgattttgaaaaagatccgattgaaacttatatagacggtgactgggtaaaagcaaaaggcactactctgggtgcagacaacggactgggtgtagctgctattatggccgtgttggaagcaaaagacctgaaacacggtcctttggaagctcttatcacgaaagacgaagaaaccggcatgtacggtgcgttcggcttgaaaccgggtacactgaacggagagattcttttgaatctggattcggaagatgaaggcgagttgtatattggttgtgctggaggtatggatgtaactgctaccctggaatataaggaagtagctcccgaagaaggagatatcgcagtgaaagttacattgaaaggattacgtggcggacattcgggattggaaatcaatgaaggacgtgccaatgctaataagttgctggttcgtttcgttcgtgaggcggttgccagctatgaagcccgtttggctagctgggaaggtggtaatatgcgtaatgctatcccacgtgaagcacatgcggttattaccattccggctgaaaatgaagaagaactattgggcttggtgaaatactgcgaagacctgttcaatgaagaatattcggcaattgaaacaccgatcagctttacggctgaacgtgtggaacttcctgcggggcaagtgcctgaagagattcaggacaatctgattgatgcaatctttgcttgtcagaacggtgtgacacgtatgatccctactgttccagatacggtagaaacttcttccaaccttgctattataacgattggtgaaggaaaggcagccattaagattctggctcgcagttcaagcgatagcatgaaagaatatctgactaccagcctggagtcttgtttctctatggcagggatgaaggtagagatgacaggcggatattccggttggcaacctgatgtaaattctccgattttgcatgcgatgaagtcatcctataaacaacagtttggtgtagaacctgcagtgaaagtgattcacgctggcttggaatgtggtattatcggtgctattattccgggattggacatgatttcttttggtccgactttgcgttcaccgcattcaccggacgaaagagcgttgattcctaccgtacagaagttctatgacttcctggtggcaactttggagcaaactccaatgaaataacgtatttctctttatataaatattctcctattatataataggtgaccatagtgaaggcacggatgatatttcatctgtgccttttttcatatttattgcagcgtatattacaattctgctttataacaaataaattaattgatgcaaatcaagaaatatgctataaaacataaatttctctcttttttagatcaatgtataaacaaaggctgtatttttgtgttgtaaaacatgtaattaggaggataacaaaatgaaaagtttaaaaagattgtttagaaagatcggcgaagccgatgtacatgtttggggatattcaacaattaataccaaaccaaacaagtaagttttattttttagttttcaggaattagtaatttaaaaggtttaaagattatggcaaagaaaatgggttctttagttagaaaaatccttagtgaagtaggtcgtaatgaaatgctttcatgggggtacagaattgagaaatgagaacaagtacattaactaagtttagagtggggatacgttattaaatacgatatccccattttttatatctaaaattttatatagagttgttttagctaacaactgtggcgggggatctgtttcagtgtcagttcctcctttaatttctgtgtttgggtacactgtcttttgccacttgggctggaatgtatcacatgcgagtttggctgattttactatcacaccctcaccgaatcacttgaaagcctttgttcatcgatgttacaaagggtgagggtaactgtgattgtagggtgagggtaatttttactctcaccctacaattatacctgtaataagtgcttaatagttgatttatagtaagttgtatgctgatttgtctggtactaatacatgaaagatgatgtatttgtgtctgataactggcgtaatattatctggaataacaggctgaacgagataatagatacggatgaattaattgtattccgtaaggtttcgattggcttctccataggggaaaatcagtttcaagcttgtgaacagtttgtttcatacgcttgaaacacttagtttcaaggtattaaacacttagttttccggtgtgaaactggtagtttcattacttgaaactgttggtctcaaggcataaaacagcttgttcaccggcatgaacaagccattttatgtagaggtgctgcaaattattgagtgtcttctatgaatatgcccggattcttataaacgagacagtgtgtaagatacctctatcttgcacgcatctgcaacggtatcttgcactgcttcaaatacttgtatatcagttgactatcgctggtttagtgtaaggtgcaagatacttttgcatttatgaacttgtaagagataggtgaatcttattgcagaagataaacttttcaattaaataataaaccgagtggcagtttttggactttttattttattccagagcgagttgattaataggctaatgtttatacaatatggtatggggctgatagcttgataaaagctttttttaagctaaaaagtacaaatctttaaactttatttccttactttgttatttataagagtgagacttatagcaaacttaaactagaaagattatgaaagtaaagcaaatttgtatgatggtgctgctatggttgggagtgattccggcggtacaggcacaaactttcgacaaattatggaaagaagtggagcaagcggagaaaaagagcttgcctaagactgtgataaaactgactgatgagatttatcagaaaggggaaaaagagaaaaactctccacaaatgctcaaagcatatacgtggcggatgaaatatcgggaaatgttgaatcccgacagtctttacgctgatttgaaaggactggaacaatgggtgaaacagactgaccaaccaatggatcgcgccatcctacactctttgatagcgggaatctatgcagattatgcagccagcaatcagtggcaactccgccaacggacagaaatcgtagaccagacacctgctaccgatatgcgtgaatggacagccaatatgttcatcgaaaaagtgcggacaaatataaaggaggcattggccgattctgtattgctgctcaaaacgtcctcacgcggctatattccttttgtagaactgggggaaacgagcgaatactatcaccatgatatgtatcatttattggcttcccgtagcattgaagcactgcaacgggtggaagaattgagtaacaggattactaatgacggtactgtgaatccggtcaaacaagatataatagctatttatgggaatatgattcccgcttataaagcaaccggattaaaagaaggttatgtgttgacagcacttaactacctggaatggagatggaatgctgatcggaatattcgacctctgcaggctaagggcgaacttccggtactgacggaagatacttatctgaaagctttgaacacattgaaaagcaagtatgcttccgaaccgatctgtgccgaagtctatttggcagaagcccggtatactattggaaaacaacagcagctcaatgcattgcagctttgcgatgaggcaatccgcctttatccaggctatcgcagaatcaatgctttgaagaatcttcgggaagagatattggctccttatttgaatgttaatgcatccgatttggcttttccgaacgaagagatagaattaagggtctcacacaaaaatctggatggtttcactgtccgtctttatcaggcgaagaaactgataaaggaacaacattacgctgtgcttcgtccgaaagattatcagacgcaggacactgtgtttacattcaaagctcctgaacttggatcttacgtgatgcgtatcataccggatattcgtgcgaagagagatagtgaaagcaagtttgatgtaacacgtttcaaagtgctgacatgccgtttgccggacaaacagtatcaagtggtgacgctggatggacagacagggtatcctattccccatgcgaaagtgacgatgtacagtaatgacgaaaaagtgttgcaggagtttacgacaaacgaagagggtaaggtcgtatttccctggaaatccgaataccgctatctgaaagcttccaaggggacggatacggcaatgccgaaacaaggcatttatgcaggaagttacggatattacggcgacgaagataaagtgactgaaaatatgactttattgaccgaccgttctttgtatcgtcccggacagactgtgtatgtgaagggaattgcttattctcaacaatcggatacggcgaatgtacttccgaacaaggaatatacggtgactttattggatgtaaacaatcaggaagtagggcagaagtcggtacgtaccaatgagttcggttcgtttaccaccgatttcgcattgccttcggcctgtttgaacggaatgttttctttgaaagcgggaagagaccatacaggcattcgggtagaagattataaacgtccgacatttgatatcacttttgaaaagcaacaaggaagttacaaactgggtgatgaggtacaggtgaagggtaaggtacaatcttatagtggtgtgctgcttcaggatcttccggtgaaatatacggtaaagcgttctgcatacagcctttggcggtttgcggaatctgtgcagattgcttccggtgaagtgatggccaatgagaatggagaattcacgataccggttcgtttgcaggaaagtgactcttataagaataatgataaggtatattatcgttattccattgaggccactgttaccaatgtggcaggtgaaacacaatcttctacggacgtgatttcggcaggaaaccgttcgttgattttgcaggtggaattgcaagataagacttgcaaggatcaacccttcgaaacaatgtttaaagtgcagaacctgaatggacaacctgtggaggtgaaggggaattattacttgtaccctgccaaagacaaggactttaagcagttggaagagaaaccggttgcaacgggaacctttacttctaatgaagacatgacgcttgactggaagaatcttccatcgggaccttatgtgctgaaagcatcagtgaaagataatcagggcaaggaagtgactgctgacaccaacacgattcttttctctgttgaggacaaacgtccgcctgtagaaacgacgatgtggttctatggtgcaaatacggaatttgatgctgcccatccggccgtgttctgtttcggtacgtcgaaaaaagatgcttatgtgatgatgaatgtattttccggtgataaattgctggagagcaagacgttgaatttgtcagatacgattgtacgtttcgagtatccatatcgggaaagttatggggatggtgtctttgtgaatctctgtatggtgagggacggacaggtttatcaggaacaggtgcggctgaccaaacggattcctgataagacactgactatgaagtgggaagtgttccgtgataaattgcgtccgggacaaaaggaagaatggaagctgacgattaaaacgccgcaaggacaagctgctaacgcggaaatgctggcaacgatgtatgatgcttccttggataaaatatggaatcggcaacagaatttccaaatctattataaccagattgtcccatattctaactggatgagtggatattccggcaataattcattcaactactggtggaatacgaagagtctcaaagtgccatcactggagtatgaccattttgtgatgctatcggactattataataatggaagagatttgggtgaagtaatagtgagaggatatggcttgacgagaaagttgacggtgacaggtagcgtttcgacattggacgttgcaactttaaggagtaatgcgccaaagatgaaatcggctatggctgctgatgccatgactaatgttgaatttcaatcggaaatgatacccacgggagaaaaagcggatgaggcatctgacaacgaaatgcttcccgaagcatctgctgacttgcgtaccaatttagcagaaacagcattcttctatcctcaacttcgcaccaatgaacagggagagatctctttctcattcacgatgcctgaaagtctgacgcgttggaacttccgtggatattctcatacaaagggaatgttgacgggaacattggatggcgaagctaccacaagcaaagaatttatgctgactcctaatctccctcgttttgtgcgtgtgggtgataagacttctctggcagcttctatctctaatatgactggtaagccgcaagccggaacggtcagtctggtcctttttgacccgatgacagagaaggttatcagtacacaaaaacagaaattcagccttgctgccggaaagacaatgggtgtggacttccagtttatcgttagtgataaatacgaaatagtgggatgccggatgattgccgacagtggtactttcagcgatggagaacaacagttgcttccggttcttagcaataaagagcatttggtggagacacttccaatgccagtgcgtggagaagaaacccgtactttctcactcgatcatctgttcaatcaacaaagtaaaacagccacagatcgtaaactaactgttgaatttacaggaaacccggcttggtatgccgttcaggcattgccttcattgagtcttccgacaagtaataacgctatttcctgggctactgcctactatgccaatacattggcttcgtttatcatgaacagtcagccgaagatcaaagcggtatttgaaagttggaaactgcaaggaggtacgaaagaaacgttcttgagcaatctgcaaaagaatcaggaagtgaagaatatcattttgtccgagtctccctgggtactcgaagcacagacggaagagcaacagaaagagcgcatcgccaccttgtttgatttgaataacatccgtagtaataatatcgcagctttgactcgattgcaggagttacagaactcaaatggggcatggtcctggtataaaggaatgaacgggagtcgatctgtaactacctatatcgccgaactgaatgcccgtctggctatgctgacaggtgagaaattaagcggatcggctctttccttgcaacagaaggctttcgcttaccttcatcaatcagctttggacgagtataaggaaatcctgaaagcacagaaagacggtgtgaagtttactggcgtttcgggcagtattctgcaatatttgtatctcatcgctatttcgggagagcaggtacccgcagccaataaagcggcttatacctattatctttctaaggtaggagaattgctgacttctccttcgatggatacaaaagcgattgccgccattgtgcttgataaagccggacgcaagaaggaagcgcaggaatttgtcgcttctctgaaagaacatctgacgaagacagatgaacagggaatgttctttgctttcaacgagaatccatatacatggggcggaatgcagatgcaggctcatgtagatgtgatggaagcgctggaacagacaggtggcaataccgatacagtggaagaaatgaaactttggttgttgaagcaaaagcagacacaacagtggaattctccggtagctactgccgatgcggtatttgcattgctgatgaagggcgctaatttactcgacaatcagggagatgtacggattgtgattgctaatgaagtgctggaaactgttagtccaagtaaaacgactgttcctggattgggatatatcaaacgttctttcacacagaagaatgtggtggatgcccgcaagattgaagtggaaaagagaaatccgggtattgcttggggagctgtgtatgcagaatttgaatctcctgtcagtgatgtgaaacaacagggcggcgacctgaatgttgagaaacagttgtatgtggagcgtacgatgaataacgtgcctcaattacagcctattactgccaaaacggttcttcaggtaggtgataaagtcgtttcccgtttgagcatccgcgtagaccgtccgatggactttgtacagttgaaagatcagcggggcgcttgtttcgaaccgatcggcagtatctccggttatcgttggaacaacgggcttggctattacgtagacatcaaagatgcatcgactaatttcttcttcgatcatttaggaaagggtgtatacgtgttggaatatagttaccgtgtcagtcgtgcaggaacttacgaaacaggtttggcaactatgcagtgtgcttatgcaccggaatacgcttcgcattctgcttcgatgacaattattattaaatagttccggcaggggatttttattctcaccgacgagcgaggcgttcctcaccgatgaagagggtgttcctcaccgaggaaggcatccttcgtcggtgaggaacttttttcttataaacaggggcttacaaggactgctattaagtaaagtcttttcccaatctgtgttaatctgtgtaatctgtggtgaaaaactcatctaaaacccctacatttgtgcaccaaaataaaaaatatcgcatgaaacgtagtttactatctatattatctttacttactgtcgctttggcagccgttgcccaacctcgtatctcttcaaataaagagacacataacttcggacaaattgagtggaaacgtccggtgacagtggaatataccatcactaacacgggaaaccagccattggtactgaccaacgtcacaacctcttgtgcctgtgccgtggccgactggaccaaagaaccgattgctccgggaggaaaaggagtcgtaaaagcttcttttgacgcaaaagcgttaggacattttgaaaagtcgataggaatatatagcaatgccagtccgagcttggtctatctgaagtttaccggtgaagtagtgcaggaaataaaagattatacaaagctacttccttatacaatcggaaatattcgtttggatcgtgatgagtttgctttccccgatgtctatcgcggacagcagccttcattgaccttcgatatcgccaatctttcggaccgtccttacgaaccggtattgatgcatctgcctccttatctgaaaatggaagcagaacccaaagtcttgttgaaaggcaagaagggaactatcaaactgacgctggatgcgagccagctaaaagattacggattgacacagacttctgtctacctttcccgtttctccggtgataaggtgagcgaagataatgaaataccggtttcggccattcttcttcccgacttctctcgtatgacggaaaaagattctttgaacgctcctgccatgcacatttcggaaacggatattgatcttagtatcccgttgataaagaagaataaggtaagccatgatatattgatagccaattccggaaagactccgttagtcatcagtaagttgcaggtattcaattcatcggtaggagtgagcctgaagaagacggtccttcctccggatggaatgacgaagctcaaagtaactattcgtaagcgtgacgtaggtaataagaagcatcatttacgtattctgatgataacaaatgatccgttacgcccgaaagtcgaaatcaatatcaaacgctaaatcctatgattatggaacatcctgaaaatagtgaagaatataaggggcttgttgtcaataaaggcattgagcaaccctcatctgtgaatccctacttaaagcggaaacctaagaaacgccaactttcagtagcagagtttgtagaaggtatcgtaaaaggtgatgtcaccatattgagtcaggctgtgacattggttgaaagcgtaaagcctgaacatcaggctgtctcacaggaaatcatagagaagtgtctgccattttccggtaattcgatccggattggtatcagcggcgttcccggtgcgggaaagagtacatccatagatgtattcggtctgcacgtgctcgaaaaggggggcaaactggcggtattggccattgaccctagtagtgagcgtagtaaaggcagtatcttaggggataaaacgcgtatggagcagctttccgtgcatcctaaatcgtttatccgccctagtccgtcagccggttctttgggaggagtggcacgcaaaacacgtgagacgattattctttgtgaagctgccggattcgataagatttttgtggagaccgtaggagtgggacagagcgaaacggctgttcactcgatggttgatttcttcctgttgattcagttgtccggtacgggcgatgaactgcaagggattaagcgtggtattatggagatggcggatggtatcgttatcaataaggccgatggagataatctggaacgtgccaagttggctgccactcaattccgtaatgcattacatctgtttcctgcgcctgaatccggatggattcccaaagtattgacttactccggtttttataacctgggagtgaaggaggtctgggatatgatttacgaatacattgacttcgtgaaagaaaacggctattttgaatatcgccgcaacgaacaaagtaaatactggatgtatgaaagcatcaatgaacaacttcgtgacagcttttatcataatccgaagattgaagcgatgctcttagaaaaagaacagcaggtattgaaaggcaacctgacttcgtttatagctgcaagaagtctgctcgatacttattttgaggatttgaaatgagactttaaatgataataaggttctgatttttagagaatacatttagcataagcgggtaggaaactttcagtctttctacccgcttgtactattaatgaagcttttctgctttttcaagatcagctctcgatttactttgagtcacaatatatactcccaggaatacaagtgcgatagcaatccctttctcccagccgaaacttccgatacccatcgcgattgctgcaatcgtagccacgatcggttgcatataattgtacatactgactaccgtaggacggagcagcctctgtgcagtcataatgcagagatatgcgaggaaactacctcctaatacgacataaagtacctgtataatggcgacagtggaaacagaagtccattgaatcgtagaaatatcataataagagaacggaatatagcacattgaagcatatatgaacatccatttattaatcgttactgccgaatatcgttgagacaatcctttgaatacagtcaggtatatggaaaaactgatttgcgcaacgagacaaagtaagtcaccaatcaggcttccatttccgttgcttcctgcctggctactcataatgagaataagtgctcccatcgcacctacaaaaatccccagtactttcttattggtaataggttctttcaagtaaatggccgctacaaccattgttacaatcggtagagtggtagttacgatagaagcatcaataggagaagtcatagaaagcccgaagatgaacactccttgattgaatactagcgcaaacagtgaagcaaagaagattttcagcatatcttgatgattcacatgttcctgtttgcaaaacatggaaaggatccagaaagcggctgctgcccccaccatgcggaatgtagtgacagaaattggagaaaactcttgaagagccgacttaccgatgggagacattaatccccacataacgtttgctgtaagcgcaaacaaatgaccatacaggttcttacttttgtccatgttgatactatttattttaccatatctctgatatcattaacaatcaaatagagaaaacggttgcaaaggtagtcttttatcgtatgatttgtttatatttgccttgattaaacttgaatattatggaacaacaagccaattatatccgtcgtatcgagatacacggactatgggaacgctttaatataggatgggatttgcgtcccgatgtgaacatcctctccggcatcaacggagtggggaagactaccattctgaaccgttcggtgggatacctcgaagaactttccggtgaaatgaaaagtgacgagaagaacggtgtgcgtctctttttcgacaatccccaggcaacctatattccttatgacgtcatccgaagctacgaccgtcccctgattatgggtgacttcacagcccgcatggccgacaagaatgtaaagtctgaactggactggcaactctatctcttgcaacgccgttacctcgattatcaggtcaacattggtaataagatgattgaaatgctttccagcactgatgaagaagaacgtcgtaaggcagccacattgtctgtagctaaacgtcgttttcaggatatgattgacgaactgttcagctatacacgcaaaaagatagaccggaaacggaacgatatcgctttctatcaggatggcgaactattattcccttataaactgtcgtccggtgaaaagcaaatgctggttatcctgttgaccgtactcgtgcaggacaacagccattgtgtattgtttatggatgagccggaagcctcccttcatatagaatggcagcagaaactgattgctatgatacgtgaactgaatccgaatgtgcagattatcctgactacccattcgcctgccgtcattatggaaggctggctggatgccgtgacagaagtaagcgatatatctaccaccgtagggcacaagctcgacaaggattctcccaactgtaatttgtaattcgtaacctgtaattgaacaaatggcaacttcactacgagataatctgacttcttcttatttcaatgccgcccataagctttatccgaagaaagcccgccgacgtatcatcgcttacgtagaaagctatgacgacatcgctttctggcgcacattgcttgaagagtttgaagacgacgaacactatttccaagtgatgcttccttcggccacctctctggcaaaaggaaaaaagatggtactcatgaacacgctgaatactgccgaattggggagaagtctgattgcctgtgtggacagtgactatgatttcctgttgcagggagctaccaatacttcccgtaaaatcaaccggaacaggtatatttttcagacttatacctatgctattgaaaactatcattgttttgccgaaagccttcacgaagtatgtgtgcaggctacgttgaatgaccgttccattttagatttcaacttctacctgaagaagtattctgaaatagtatatccgcttttcctctggaacgtatggttctatcgccaacgggatacttacactttccccatgtacgatttccatacttatacttctttgcgcgagattaatctccggcatccggaaaagagcttggaatcccttcaacaacgggttaatcagaagttggcagagttgaaaaggaaattcccccataacatcaatcaggtgaatggattgcggactgaatttaaagagctgggcttggtgccggaaactacttacttgtatatgcagggacaccatgtgatggataatgtggtaatgaaactactgattccggtctgcaccgtattgcgccgtgaacgggaacaggaaatcaagcggttggccgaacacaatgaacagttcagaaacgaactgacttgttatcagaacagccaggtgaacgtagaaatcatgctcaagaagaatgtagcctacaaaagactcttccattatgattggctacggcaggatatcagtgaatatttggaagaaggaaagaataaagaagaaaagaaacagagatcataaataaaagaaaaactaaaaaagagagagacgattgcttatgaaagaagtaaaagaagtggttgatacagtgagtgtggcattagcaaacgggcaaccggaagaagcaggtaatgtagtgatgcaagaggtgaatcatgctttgctctcgatgggagtggatgaagctatggctgataagattgataactttatcattttattgtttattattggaatagcattattggctaatctgatttgccgcaagattattctgcgtaccgtggctaaattggtgagacagacaaaagctacttgggatgatattgtatttaatgataaagtaatggtgaacatcagcaggatggtggcgcctatattgatttatatatctattcctattgccttccccgaacatgcagactctgctttgcttgattttcttcgaagactttgcatgatttatatccttgcagtctttcttcgcttcgtcagtgctttgttcacggctgtgtatctggtatatagcgcgcgtgaacaatataaagacaaacctttgaaggggcttttgcagacagcgcaagtcattctcttctttataggagctatcatcattatcagtattctgataaagcaaagtccggtagtgttgctgaccggattgggagcttccgctgcggttctgatgttggttttcaaggacagtatcatgggatttgtctccggcatccagctttccgccaataatatgctgaaggtgggcgattggatcacgatgccgaaatacggtgcggacggtacggtgatagaagtaacattgaataccgtaaaaatacgtaacttcgataataccatcactaccattcctccttatctattgattagtgattctttccaaaactggcagggaatgcaggaatccggcggacgtcgtgtgaaacgttccatcaatatagacatgaccagtgtgcatttctgtacaccggagatgttggcaaaataccggaagatacaactgttgaaagactatgtggatgaaacggaaaaggtagtggaagaatataataaggaacatcatatcgacaactctgtgttagtgaatggacgtcggcaaacaaacttgggagttttccgggcctatctgactaactatctgaagagtctgcctaccgtcaaccaagacctgacctgtatggtacgtcagcttcagcctactgaaaccggtatcccattggaactttattttttttctgccaataaagtatgggttgcctacgaaggcatacaggcagatgttttcgatcatgtgcttgccattattcccgaattcgacttgcgtgtcttccaaaacccgtcgggggcagacctgcatcggataggggtaaagatagaaaactaatcaaacgataaaacgcttataaattgtaattactatgactacaccgttatccaaccagattatccgtgaaatcactcctttgtcagataaggattgcttttacattgcggaacgttataaaacggaattcacttatcctatacacaaccactccgagtttgaattgaacttcaccgaaaaggctgccggagtaaggcggattgtaggagactcttccgaagtgataggtgattatgatttggtattgataacaggaaaagatttggaacacgtctgggaacagaacgactgccattcgaaagagatacgggagattacgattcagttttcttccgatcttttcttcaagagctttatcaataagaatcagttcgactctatccgccggatgctggataaagcacaaaaagggctttgtttcccgatgtctgccatactcaaaatatatccgttgctggatacgcttgcttccgagaagcaaggattttatgcggtcattaagtttatgacgatcctgtatgaactttctctctttgaagaagaagcgcgtaccttgtccagttcgtcttttgccaagatagatattcattcggacagccggcgtgtgcagaaagtgcaggagtacatcaatacacattatcaggaagaaatacgcctggggcagttggccgatatggtggggatgacggatgtgtcattcagccgcttcttcaaactgcgtacaggcaagaatctttccgattatatcattgatattcggctgggctttgcttcccggttgctggtagattctaccatgtcaatagccgagatttgttatgagtgcggttttaataacctttccaatttcaaccggatcttcaagaagaaaaagagttgttcgcccaaagagtttcgtgagaactaccggaagaaaaagaaactgatttagtgtattcatccttatgaactaattcgccgaatacggagaattaggtttcgatatgcataaaattaatcgtctgacggttgttatcttttcgtctgactactgttgaactttcgtctgacaattgtcagacgaaagttcaacagtagtcagacgattaattttatgcataatgagagataaaagagtgaagttccggtcttaaatttgcttataaacaagttaaactaatagcgtaactgattgataatacgtttgtaacatcttgtcatcatcttgcaatgactctttcaatagattgtatttttttcgtcttacggttgtaatgctcaccctctatctttgccgacgtaattaaaacgtagagcaaagttagatgaaaaaactatttcttatccgattttcagtggtagccttcttttgcctgttgtgtgtacttcctgcattggctgctaatatcaagattaaaggagctgtgaaagacaaactatccaaggaacctttgataggagctacgatacgtttgctcggaactcaagccggagcagtgaccgatatggagggcaatttcgaattgaacagtatgggcattctggaaggtatgtatgatattgagattaaatatgtaggctacaaaacagaagtgcgccataaagtgcgtgtggagaatggaaaacaggtgatactgaatctggagttggaaaccgatgcacaggaacttgccgatgtggtggttgtagctaagaagaatagggaaaatgagaatatgctgttgctcgaacagcaaaaagcagtcattgccgtacaatctgttggtgtcagggagctttcccgcaagggtgtttcggatgcagaaggtgctgtgacgaaagttgccggagtgtctaaacaagacggagtgaaaaatgtctttgtccgtggattgggtgaccggtacaatgcaactacttttaatggatttgctcttccttccgaagacccggaatataagaatatctctcttgatttcttcggtacggacattattcagtcggtaggtgtaaataaagcattcaacgcgggaggcagcagcgatgtcggaggggcaaccattgatattgtatccaaagaactaattggtagcggtcatctgggattcggcatttccggtggcttgaatacacaaacggtagcagccgattttctgaaacaggatggagtgaacttcatgggctttgccaatcgcaccgaacctgccgatgaaaattcatggaacttcagaaataagttagacccttccgctcaacattttcaaattaaccggagttacagtatttccggaggtaaacgattctatgtcggaaaagacaaaaatccgctttctttcttcctgaccgccggacatacgatggactatcagtatacggatgaaatcatacgtaatacaactaccagcggtacggtctacaaagatatgaatggtaagaagtatgcggagaatatcagtcagctggcacttgccaatgtggatttcgatatgcagaaccgtcatcacatcagttataatttgatgatgattcatgccaatacccagtcggtgggcgattacaacggtaagaactcgatttttagtgatgactatgaaaacctcggattcacccgtcgccaacaaacaaatgacaatatgctgatcgttaaccaactgatgactaactggggattgaccaaatcattaagtctcgatgcaggtgcttcctataatatggtgaaagggtatgaaccggatcgtcgtatcaataacctgactaaagcggaagacggctatacgttgctaaggggcaactcacaacagcgctacttctcaactttagatgaagacgacttgaatgtaaaagcaggcttggtctatcgtctgaaagataatatagaagaaatttcgaatgtccgtttcggatatacaggccgattcgtagatgataacttcaaagctacggagtataacctgaccgtagggcatgtttctaccctcccttctttggacaacttatcgcttgacgattattataaccaagaaaactttgcttccgactggttcaagatacagaagaacttagatgaatataccgtaaaaaagaatatccattccgcttatgccgaggctacctaccagtttactccctgttggattgtgaatctgggaatgaaatacgacaaggtagatattgaagtggattacaatgtgaatcgtggaggctctaaaggaaacaataccattcaaaaagattatttcctgcccagcttgaatctcaaatacaatctgaatgataaaaactcgcttcgcttcggagcaagtaagacatatacgcttccacaggccaaggagatatctccttaccgttatgtcggcgtgaacttcaacagtcagggtaaccccaatctgaaaccttcggataattataaccttgatctgaagtgggactttaatcccactccgaccgagttgatttctctcacagctttctataaattgattaagaatccgatatcccgcatcgaagtggcaagcgccggaggttatctttcttatgagaatatagcggataaggcaaccgtggcaggagtggaagtagaaatacgtaagaatctgtttgtccgtccggtgagtaatgctgcgcacggaatgaataaactctctttgggattgaatggctcttatatctacacgaatgcaaaaatgcctttggcaacggttaccaccggttcgcaactggaaggagccgcaccgtggattgtcaatttcgacctctcgcataacttcacgaaaggagaacgcagttttgtcaatacattggtacttaattatgtgagtgataaaatatataccattggcacacagggctatcaggatataatggagcagggagtactgacactggattttgtgtcccaagccaaactgaacaagcatctttcgcttaacctgaaagcccgcaacctgctgaatccctcttataagttaagtcgcaaagcgaacgaaaacggggaaaaggtgatattgaatgattataagaaaggaataaatataagcctgggagtgtcgtgtacattctaagccgggtgatgaaataagattattaactaataatgaaagcaaaatgaaaagattgtttgtgaactttatgacgtttgccgttatggcaacagcacttacattgactgcatgtagcagtgatagtgacggagacggtgatggtaacggagatggtggaaacaacggtgggaccggtagctctattgttgtgggcgaaaatatcctgtccggcacgctgaccggagaacagacactggaagctaaggaatatattctgaatggaacggtagtcattgaaaatggaggccgtctgaatatccctgccggaacaacgattaaggctcgcgaaggtttcagcagttatctgctggtagcacaaggcggtaaactttatgctgacggtacagctgataaaccgattgttttcactgccaattcaacaacccctacatccggctattggggaggaattattatcaatggtaaagctccgatttccggttcgaacgccaataagagtgatacaggtctgacggaaatcgacaacaactataaatacggtggtaatgtcgataatgacaattccggttcactgacttatgtgaaaatctgctatgccggtgcccgctctactgccgatatcgagcacaacggattgacactgaacggtgttggaaacggtaccaagatcgagaatatctacattcttgagagcgcggatgatgccatcgaattctttggcggtacggtgaatgtaaccaacctgttggctgtgaacccggatgatgatatgttcgacttcactcaaggatattccggtaaattgaaaaactgctatggcgtttgggaaagcggttataccagtacggaagcagatccgcgcggcattgaagcagatggtaacttggatggcatttatccggatcatttacgtcagtcagactttgcggttgaaaatatgacaatcgtaaataatgctgccaatacaacggataatgtagaccgtatgcaagacgtgattaaaatccgtcgtggagcaaaagctacgatcaccaatgctcttgtcaaaggttccggcggtacaatcgatttgattgatatgaatgacagtaaaggggcaggaagtgcagcttccagcatcagcatcactcatacattgaactttaagaataagctgaacggtacattgaatacatttaccgagccgactacgaatactggtgcagatgcatccctgtttacttggactggatataatatttcctcattataataagatataggttagcggagtccgtatttttcaataggaggtatgggagaatttgtaacaaacagattctcccatattctatttatttattttcgtaatcttcttttagcttttttatttgctcctttatggtatgagtgattaccttttttgtatatttgtcaacctattgttttacaatgatacaaaatatgcaaacagacaacgagcgatacagaaaaatggcttctcttgcacaaatcgggtggtgggaagtagatttaacggcaggatattatttatgttccgattatctttgtgatcttttgggattggatggtaatactatctctgcttcggattttttgaatctgatacgtgaagattaccgcaagcagattgcccaggagttccgggcaaattcttctatccataaggacttttatgaacaaactttccctattcattcaaaatatggcgaggtctggttgcatacccgtctggcttttcgtgagaggggtacaggtgttgatggaggtgataagtctttcggaataatccagcgcgttgaggctcccaaggaagaagatcaaagggatgcattaaggcgtgtgaatgatttgctttgtcgtcagaattttgtttcgcaatcgttgcttcgtttcctacgtgatgaggcagtagaatcttgtatcgcagatattttgagagatattctgaatctttataatggaaaaggacgtgtttatatttttgaatacgacgaaatttatgcccatcatagttgtatctacgaagttgtttctgaaggggtatcggcagagatagacaatctgcaggacatgcctgccagtgagtcaaaatggtggagtgaacagatattatcgggcaagccgattattttaaatacactggagcagttattagaagaggctcctgatgaatatcagattcttgtagttcagggaatcaaatcgttaatggtgactcctttgatgacaggcgaccgcgtttggggatatatggggattgatttggttgagacttaccatgactggagtaatgaagattttcaatggttctcctcattgggaaatattataaatatctgtatcgagttgcgtcaaactaaggacaaggtaatccgtgaacagactttcctaaataatctgtttcattttatgccgatgggatatatacgtatgtccattatccgtgacgagaataataaaccttgcgattatcgggtgacggatgcgaatgaggtcagttcaacctttttcgggcttcctttggagtcgtatattggttctttggcatctgaaaagcatcctgactatctccaaaaacttaattttctggaagaaatactgggtagtaattcttatagagagaaagatgaatatttctctcgaacggaacggtatacgcattgggtgatttattctcccggaaaggacgaaatagtcggtctatttctcgattctacgggatcggtacaagctaaccgggcattggatcgtagtgaaaaactctttaagaatatctttgctaatattccggcaggagtagagatctacgataaggacggctatttgatagatttgaataataaggatttagaaatattcggtgtagtgaataaatcggatgtgataggggttaatttctttgagaatccgaatgtgccgcaggggattcgtgatcgtgtgcggaatgaagatctggtggatttcagacttaattattcttttgagcaagcaggaggatattatgagacaagccgttctaatgtgatagaactatattcgaaggttagtaaactatatgataatgagggtaacttcagcggatatattttaataagcattgacaatacggagcgtattgatgcaatgaaccgtattcgtgattttgagaatttcttcttgatgatatccgattatgcaaaagtaggatatgccaagttgaatctcttgaaccgcaaaggttatgctataaaacaatggtataagaatttaggtgaggaggaagatattcctttgagtgaggtggtagcagtttatagccaaatgcatcccgaagaccgtaagcgtttccttgatttttatgatggagtcagagacggaaaaaggaggcatttccaaggggagatgcgtattcgtcgtcccggaacgaagaacgaatggaattgggtcagcagtaatgtgatggtcaccaattataaaccggaagaaaatgaaatagaaatcatcggtattaattatgacattacagaattgaaggagactgaagccgaattgattcaggcacgtgataaagcagagatgatggatcgtttgaaaagtgctttccttgccaatatgagtcatgaaatccgtacgccgctgaatgccattgtcggtttctccgatttgctggtagaaactgaagagctggcagaacgtcaggagtatattaagattgtacgtgagaataatgaacttttgttgcaattaatttcagatatactcgatttgtcaaagattgaagcgggtacatttgagtttactaacggagatgtagatgtaaatctgttatgtgaggatattgtccgctctatggggatgaaagcgaaagaagaggtggaactggtgtttgatgatcatcttccggtttgtcatgtcattagtgaccgtaaccgtatacatcaggtgatctctaactttgttaacaatgcaatgaagtttacctctgaaggtagtattcatgtgggatataaactaaaagatggcgaattggaattctatgttgaagatacaggcatcggtattgaaaaagagcagttgccacatatctttgagcgttttgtgaagcttaattcttttgtacacggtacaggattgggactttctatctgtcagagcatcgttgaacaattaggtgggcggattggcgttgattctgaaaaaggaaaaggatcaaggttttggtttactattcccggagtgatcgtgacggaagagatgaactgtgcccggtagagtggtaataaggcaggtgaatatcttccttcctcattaataaaagcggcttttatatagaagaaacggtcttggttttgatgtcgattgatactgacatgaaaccaagaccgtttctttggtgaaaaggtgtagtccgtttaaattccgaacgacagtttatcgatagattgatatacgatacttgcaatacccagtccgatgatacccaatgtgcaaagtgctagtccccattttgtgcaacgatcgctgcggaaagtaggaatcgggttgtcggaaggagtgatgtacattgcttttacaatcaatagatagtaatacaacgaaatcactgtatttaccaatgcgatgaataccagcaagtggaaacctgcatcgaaagcagccatgaagataaaaaacttagagaagaatccggcaaacggagggatgcctgccaatgagaacagagacagagtcatcaagagagcgattttaggattcgttttataaagtcctgcgtaatcttcgagcgtgaatttctgactgcgtaatgccacgatagtgataacggcaaatactccgaggttggcggcagcgtacactaatacataatataccaatgccgtcatgccttgtgctgtgcctccgataacgcctaacataatatatcccgcttgcgaaatactggagaacgccatcaaacgtttcaggttttgctgacggacagcaaatatatttgcaatagtgatagaagcgatggttacccaataaagtacttcctgccagtcattaatcattggagcgaatactttgataaggacagccaataaaacaaatgctgccgatccttttgatataacactcaaataagcggtaactgtactcggagcgccttcgtaaacgtctgctgtccataagtggaacggaaccagtgacaacttgaatgccattcctgtgaagaagaatataaatgccatgatctgtaacggatttccgtcgatatgggcagggaggtcatcgaaataaagagtcccggcagaaccatagatcatggacagaccaaacaacagcaatgcactggagaaaagagctgtcagaatgtatttggcacctgcttcggcagagttgtgacggtatttatcgaaggcaatcaatgctgccatcggaatagaagctgtttcaagaccgatgaagaacatcaggaaatgtccggcggaaatcatgagatacataccaaacaaggtagagagtgtaagcacatagaattctccttgtttgaatgaagtgtcttctcttttcatccactcgtgcgccatcaggaaaacaatcagtgtaccgacattcaggatcgatttaacaactgtgtgcatcggtacatagtgatacataccaccgaatgcatcggtagcagttcccggaatcaagttgatagccgtatggatagccatcagaataacgggcaacatagtgttcaggcgtgctttcccactatttttgtgtgcatccggactcatgaagaggtcagctagaaatagcagcagtaagacagctatgagcgacagctcttctcgcatatttagaaattgtgaataatccatcttgtttatttatgaattaagaattatgatttatgagttaggggattagttgtgagacaaccggtaatacgctttcaccaatcatgtggctaacccagaaaggagccatacctagtccggcaacgcaaacgatgaggcagataacggctacacgttcgtcccaagttgcgtcggtcagttcgaggtgatgtttgttggtgcaggttccgtatagaatcttacctaccaggcgcaggatgtagactgcggtaatcacaatcgaagagcaggcgatgatggtcagtgtgcggtgaaatacgtcgttgttctggaaagagccgacgaagatggtcatttcagcaatgaaaccgcttaatcccggcagaccgaggttggcaagaccggcaatcacataacatacactaaggaacggcataattttcattaaaccggcaagttcgcgaacgtcacgtgtgtgtgtacgtccatatatcataccgatcagagcaaagaacaaggctgtcattaatccgtgtgaaagcatttgaaggattgctcctgttgctgctgtctggtttagcatcagaatggcgaaaagaaccagtccgcagtgagatacggatgaataagcattgatatatttcaagtcggtctgtacgcaagcggagaaggctccgtagactacagagatacctgtcagtatcaggaatatccaggaaagttcgttggctgcttccggcatcagatacatggcgatacggaaacatccgtaacctcccagtttcatcaatactccggcatgaagcatggatacggcagtcggggcagaagcgtgaccgtcaggactccatgtgtggaacgggaaaagggcgcccaatacaccgaagccgaggaaagtcagcgggaaccagatgcattgctgtgcaaaaggtatgttgtgcaactgtgcaatttcgagaaggttcatggtggttgctcccgagccgaaatagattccgagaataccgatcaataggaaagcggaaccgcccatcaacataagggtcagtttcatggctgcatattctttacgtcctgatccccatacaccaatcagcaggtacatcggtatcaacgcaatttcatagaacatgaacatggtgaacaaatcgacggatataaagaatccgaatactcccatagacaacagggtgaaccagaggaaatattctttcgtcagcggttgcaggcgccaggaagcgaatgtaccggtgaatacgatgacagcagacaataacaacatggctaccgaaattccgtcaacacctactgaataagatatgtgaagcggggcataccaaagcgtatctgcacggaaaagcatttctgccgtatttccggcgctacgctctcccagatacaggaatgtaagtacgacggaggcaatcagaagtgccgatgcgccagtaaccataaccccccggatggctttgattcctcgtgctgcccaaagtccggccagcatcaataaggggataagtacgaatatggataagaaattcatctttatgatttactatttaaagatttactatttactatttagagaatcagcagtaggataagtgccaatgcaccgcaaaggaacacatacgcatattgttgtacctgaccgctctgcaaaccacgaatctcgtcgcttgttgtattggtggcccatgccaggaagtcaaagaatccatccactacatgacggtcgaaccatgcgataggagtagagatgcagcggaagataatcttatgcgtaataaactggtagatatcatcaatatagaagcgattataggctgccttgtgcagacctttgaatcgttttgccaacgaatcagcaacaggctgtttggcattcttgtacatccatgtagcgattgcaatcgaaataatcgcaataacaacgctcgtaatagctactgacggatcgagatggatagaataagattcaccattcgaactgatgaagtgtccgaaaggaataaatcctgctccacaagttacaactgccaggaacatcagcgggaaagtcatagccaacggactctcatgtgggcggcaaggtgccgcttccaagtttccgtgcggcgtgttatgttccgaatgggaacctgcccggggcggctcgctcccccaaaaaataccgtagtaaaggcggaacatatagaaagctgtcattgcagcgatgactgtcatcacccatcccattacagggctgtattggaaacaagcagccagaatttcatccttcgagaagaagcccgagaacggaggaataccggcaatagccagacaagcaatcaggaatgtccagtgagtgatcggcatatatttgcgtaaacctcccatagcggacatttcattagaatgtacggcatggataatgctacctgcaccgaggaagagtaatgccttaaacatggcatgtgtgaaaaggtggaacatggaagccatgtagcccaaacctccttcgtgcggattcatggaagtacaaacacccagagctaccatcatgaagccaatctgtgaaatggtagagaaagccagtacacgtttgatgtctgattgtacgcaagccacacttgccgcgtagaatgctgtaaatgcacctacccaagcaaccatgtgcagcgtattcggtgcgtatgtaatgaaaagtgggaacatacgtgccaccagatatacaccggcaactaccatggtagccgcatgaatcaatgcgctgaccggagtaggaccttccattgcatccggcaaccagatatgcaacgggaacatggcacttttaccggcaccaccgacaaacatcagtccgagagccaacggaagcatagaagctccaccgcttatcaaggatactgtatccggagtgaagccgaatgtaccaccgtaatatccgtaaatcaggataccgatcaggaagcccaagtcagcaaagcgagtaacaataaacgctttcttggaagcagcaatggcagccggttttgtataataaaaaccgattagcaggtaagaacttacccccaccagctcccaaaaaaggtacatctggaagatgttggttgcaacgaccaatcccagcatagacatggtaaacagggataggaaagcgtaatagcgttgaaaaccgacttctcctttcatgtaaccgaaagagtagatatgtaccatcagtgacactgtagagatgacgatcaacatcattaccgatataggatcgagcaagatgcccaaatcgaagtgtaaagtctctgtaaaaggaagccacgtgaagttgtaaggcatcagtgtggcgaatgttccgtcttccagtcgtggagcggagaaatattggaaagctgtaacgtaggatagtactgctactgctcccagtatcagcgtaccgattgtacccgctgtccggtgggacatccatttacctccaattcccaatatgagaaaggagaagaaaggaagaaggagtattagaattgttagttccatacagttttatttaattacttgagttattattattaattcttggtcttatagctgataatcactatactcggaccttctgttttgtttcccggtgtgaaactagttgttcctcggtgagaaacactttgtttctcggtgtgaaacgaagtgtttcaagggatgaaacaccttgttcctgggaatgaaacaaatcaccacttcaactcgtccagattgcgcacctgaatgcttcgaagattacgataaatgttaatcatgatggcgatagctattgcagtttccgcagccgagatggcgatggaaaagagtgcaaagaaataaccctccattccccccggaaaaaggaaacgattgaatacggcgaagttgatgtccgtagcattcagcattaactctacagaaatcaggatagccagtgtatttcggcgggtaaagaatccataaattcctgcaaacatcatgatggtagaaactaccaggtaatattccatgtgtatcatattcgaactctattttgatagttaatacttaaaattcctatctcttacgtgcaatcatgatgccaccgatgatacacgccagcaataatatgctgacagcttcgaaaggcaatacataaccgtatttgtcactacttaataaagcgttcccgatagcatgaatactaatttcttgcggggccaaattagctgtctgcatgaaatcgtgcttcagtgtgataaacaggataatggccaaaccggcaatcatagtgaagagtccggctaagactttacttcgttttgctttctcggcccggtcgccttctccactggtcagcaggatggagaatacataaagaacgacgataccaccggcataaaccataatctgaacggaacccagaaaggtgtaacccagcaaaaaatagatgccggccgtgccgaagagcacgaagagcaggtaggtggccgagcgtacgatacgttgggtagtcaccgtcatgatggacatagcaataataaatgctgccaaaaagtagaatactactgtttcaagtgttgatcccatatctaaacttcttttttcttttctattactttactaccgtcgtggttcaacttcaggacaagtttcgtccggtcgaagactgcatgttcgaagttctgatcgaacgtgatggcatcgtgcgggcaagcattgacacagagctggcagaacatacaggcacccaaatcatattcataggttgccaggattttcttcttttttccatcttctgtttcgacggtttcgctggtcactttgattgtatcgttcggacaggccatttgacacagtccgcaagctacacagcgatgttcattattctcattgtggggcatattcagcgtaccacggaaacggtcgaacattttcagctctttccggttttcggggtattgctcggtcactttcttacggaagtataccttgatgctggttttcatacccgttgccagtgtactgatgccatgcaccagaccacctaagtacgtatattttttatctttatattccataatttacatttatcaaaagtggaagccgaaagctacgcagcatgccattaataatagatttaccatagaaattggaaccaggtatttccattccagattcaagatctggtcgatacgcaagcgtgggaaagtccatttgatccacatcaaaaggaataccacaaagaatgctttggcgaagaaccagataaagcccggaatataatccattacagtgttaaatccatccaaaccaacaatgtgcagcggcatccatcctcccaggaagatagtggcggcaacactggctacgataaacagattcaagtattctgccagatagaagaaaccgaaacccataccggagtattcagtgtgatagccggctgtcagctcactttccgcttcaggaaggtcgaacggaccgcggttacattctgcatttccggcaatcagatagatgatgaaagcaatgaccgcaggaatatgtcccttgaagatgaaccaaccattagcttgtccttctacgatttcagaaaattgcatggttcccgtcagcactaccattgtcatgatactcataccaaccgaaagttcataactgataatctgtgcaccacttcgcatggcaccaatcaaagagaatttgttgttactaccccaaccggccagcaagataccgacaactccaatgctggaagctgccaacaggaagaacacgcctacattaaagtccagaatcgccgcacctttattaaaaggaatacaagcgaaagtcaggaatgaagcgataatcaccatgaatggagcaagattgtaaaggaaatggtcggcgcccttcggcatgaagatttctttggtcagcattttgagcacgtcgcagaccacttggatagaaccccatttaccaacacgattcggaccaagacggcactggaagaaaccgcaaaccttacgctccatgtagatcaatatgatagccaggatggcatacagtgctacgaggcacacgccgacagttacacattctataaagatggctagtccctccggcataatggagagcagtagctcatgtatccagtttgttactatactaaagtcgaacatatatttttaataattaagtattatctgtcaatatccggaacgacataatctattgttccgccaatagcaattaagtctgcaatctttgttccccggcaaatggtgtcaattgcagcaacaagcggcaatcccgtagcacggtagtgcaggcggtaaggcgttttgtcaccctgactttccaggaagacaccaaattcaccacgacttccttctactgctgcatagtaactgccttccggaacacggatgataggtttcatcttctcctgataaggtccctcgggaatattgtctattaattgctcaatgatgttcagactttccatgatctcatccatacgcaccaggtaacgggcaaagcagtcaccttccgtataaacgatttctttgaaatcgactttgtcatatacaccgtatggcattcgtttacgtacgtcacacgcccatcctgatgcacggcctgtacctccggtacaaccgaaagagatggcatcttcacggcttaacacaccgacgcctttcatacggctctgtgcgatgatgttacccgtgaatatatcgtgatattcgtggataattcctctcatatatggaatgaactcttttactcgtttgacgaagttaggatgaagatcagcctgtacaccgccaatcgtattgtagttcataatcagacgtccgccgcaagtttcttcaaagatatcgagaattttctcgcggtcacggaatccataaaagaatgctgtcaacgctcctaagtccatagcaagacaagagtagaacagcaagtgagaatcgatacgttgcaactcgtccattatggtacggatgtactgtacgcgttcactgacctcaatgcccatggctttttcaatgcacatacacaatgcatggcggttctgatgcgcgcccaaatagtccagacggtctgtcaaagccaatgtttgaggataagtgaggctttcattcattttttcgattccccgatggatataaccacagttcgcatcaatcttacgaatgatttcaccttccagagaaacacggaagcgcattacaccatgagtagcagggtgctgcggaccgatgttgactacatattcttcttcgccgaacagtttcgtctctttgttcttgatggttccgtccgggttcagttctatttcttgagtcgtatcaaacgtctcttcattggtcatgcacagtgggttatccttttccgggtcgttatctttacgcattggataaccgatccaatcgttgcgcaggtagagccggcgcatatcaggatgaccaacgaaggtgatgccataaaaatcaaaaacttcacgttcgtagaagtcggctatcttccagatgtcgctgacagacggaatttccggtagctcgcggttggttgtcgctgtttttagtgctatccgttcgcctgtaatggtagattccagatggtagactacgcctaagccgcggagtttttccggagcgtctttctcatcggctactccccagtccataccggtgaggctttcgagaaagtccatctgtttttcatttcgcaagcgcagcatctcgtcgtgtaacgctgcaggagctataaattgtatttcttgcataaatcaaattaaattaagaatgaaaaattaagaatgaaaaatctgccgggatgttgcatgcgaattcttcattcatcattcatcattcttcatttcttaaataatccggtttcttctcttttctgtttactccaccaaagaacttttctattttcactttgcgttgcaattgcatcatgccataatagaatgcttcaggacgtggcgggcatccgggaatatatacatctaccggaagaatcttgtccaccccgtttactacgtgataggacttcttgaaaggacctccgctgacagcgcatccgcctacggcaaccacatacttcggatcgggcatctggtcgtaaagtcgtttcagtaccggagccattttattggtgattgttccgcataccataatcatatcagcctgacgcgggctggcacgtgctacctcaaacccaaagcgggccatgtcataacgcgcggcacccagtgccataaattcgataccacaacaactggttgcaaaggtaagcggccacagtgaattgctgcgtccccagttgataaagtcgtcaagtactccgagggcaacattggctcctcctgcattaagttctttgaccaacttttccaatgattcattgtcaataaactcatcatacggaatagattttatttttggctttttggttatttccattccaaagctcctttcctccaggcataagcaagacccagaactaaaatgataaagaagaagagaacactaataagtccctgtggtcccatgtcacgcataactaccgcccacggaaacagaaaagctgtttcgacatcgaacataaggaataggatggcaaacaagtagtagcctacacggaactgcatccatgatttaccacgtgtcggtataccacattcataagcctcaaacttttgcaggttgtatgaacggggagagatagcacgcgagagggctattactacaccgacaaaagcaagcgctgtcagtaaaacaacaactaaaaatgtaaaattcataattcaatagctgtttagattgaatattatatagaaataagcaattagtctattcgccctatggagaataaaaccaactgtaataaatgacgagcaaaagagtctactgtactgtaggctaaatgacaatctttctcaacccatatatataataggagataggatcgtaataatatgtaggagaatgggatgagacagggtaaggcggactttgatgtttgtaatggtcacagaaataagcgattaacaaaaacatgcttttatctgtcggaacatgtgcgacatctgtatgactcatgtcacaggtttgcgtcgtataaagattataaagacgttccaaagcatcctgaatcggacgatcttgtgatacatagcatttctcctgccgataagtcggggaggaaactttgcacatatcttccattgctccattagttgcacaatggatgagcaaagccaacactaaaagtagtccgaattttaagctttgtttcatctttctcttttaacggctgcaaatatagaactaatatttatactttttgcaaagtccgtatagcaaaaaagctttttttaactccatatcttttagattcattttttagtcagcatggtttcacaaatatcatttagaatggggtaatttctccatcttcatttgttaaaagatgcaataaaaagaatgatttacgctctttttggcgaataacacaaagaaaatacatttttttgcagattaagaaagaatacatgattatgaaacgcacactttggtttatatttttccttctaaactccttgttttacctctatgcagatagtgagaatgattctttgttgaaggtgttggacaaagtgatttctgaacgtttgatatatacccagaaaaaagaagctaccataaaagaattaaagaaaaagaaagttggccttaattcgttggaggatatatacaatttaaataaagagattatccatcaatatgagacttttgtctgtgactcggcagaacaatatattcatgagaatattgatatagcaaaaacgattggtaataaagaatatcttttggaagagcagctccggttggcttttgtctattctttatccggtttgtttattcaagcaaatgatatttttaagtcgataaaatgtgcggatttacccgatcatttaaaagctttgtattgctggaatcgtatacgttattatgaaaatctcattaaatacacggacgatgtacggttttcaaacgagtatatatcggaaaaagaggcttatcgggatactgtgatgagcatcttatttgaccagtcggatgaatatagaaaagaaaaagctgtgaagcttcaagataagggaagtaccaaagaggctcttctgattttgacagagatatatgataaacaagagccggcatctcatggctatgctatgatggctatgggacttgccagggcttatcggttgattgggaattatgcattggaagaaaagtttctaatgctggctgctatgacagatacaaaactggctgtcaaagagaatgaggcattattgacattggcagttaatttatatcataaaggagatatagacagggcttataattatattaaagtagcgttggatgatgccatcttttataattcccgttttaagaatacggtaattgcccgcatccatccgattattgaaaatacatacttgatccggttggaaaaacaaaagcagaacctccgtttctatatatttctgactagcttgtttgtggtagctcttgctatcaccctgtattttacatataaacaaacaaaaattgtatcccgagctaaacggcatcttaaagctatgaatgaggaactggtcgggctgaataagaatctcgacgaagctaatctgattaaggaaaaatatgtggggtattttatgaatcaatgtgccgtttatattaataaactcgatgagtacaggaagaatgtgaacaggaaaatcaagaccggacagattgatgatttatataagtcatcctcccgaccttttgaaaaggaacttgaagaactatatcataactttgataaagcgttccttaaattgtatcctaactttgtggaaaagttcaattctttgttgaaaccggaggaacgttataaactggaaaaggaccaactgaatacagaattacgcatatttgcattgatacggttaggaattaccgatgttggacagatcgctgtatttttgcattattctgtgcagacaatctataattataagagtaaagtgaagagaatgtcgactcttgatagtaatatctttgaggaggaggtaaaaaagcttggttctttgtctcaaaaatgattctatccggtttaccaaaactaaaaaatggtattattataaactgttgattattaagtgtatatataataattgatctataaaacgtttactttcccgcctacttccactaagaagtaggcttttttcatctctatatttgcatcacaagatttttgataactgaatactaatctaaagaaacacacaactatgagtttttcagaattgtatcttatttattatcccaagctagttcggtttgcaaaagaatttgtgatgtcggaagaggatgctgagaacataacacaagatgtgtttacagacttatgggaaaagagagagtcaatgaatcatattgagaatatgaatgcttatcttttcagacttgtgagaaacaaatgtttggattatttaaagcataaagtattcgagcaaaagtatgtcgagaatgtgaaggcttcttttgagattgagttgaatctgaaattgcaatctttagatcgttttgatgtatatgatatatcagaaagaaatcagatggagaacctgatacgggatgctatcaatagtttgcctaaaagatgccgtgacatatttttgttaagtcgcatggaaggattgaagtatagggaaatatccgaacgtttgggcatttcggtaaatacagtggaatgtcagatgggaatagcactaaaaaagttgagagcaaaactcaatgtaacattggctgcataactttttaatgattttatcggtattttttaggggtatttattgagataatcgttctttgataaaaaaggactgtgtatatggagaattgtctgaataaatattttgcggatgaatttacttctgatgaaaaaacagagtttctcatagaagtggaaaacaacgaaaggctgaaggaagaatttatagaaaatcagactttgctggcactcgttgattggatatctccggaatatgaaaataataaagaagttgtccaacataaattatatgaatttatgtgtagaatggagcaacacaaagataaataggtttaggataccatgaataaaatttatatcatattactgactgttttcttttgtgcaaatgtttattctcaacaagcttattttgttgatgggtatcatggcgggatatatggccattatccggtaaagtggaaaactcaatttattgtggatcagctggctatgcatccggattggcggatttgtatggagatagagcctgaaacatgggatacagtcagagtacagactccggaggcttatttgcgttttaaagagatggctaccagtgaccaggtagagtttacgaaccctacttatgcacagccttattgctataatatctcgggagagagtataataagacagtttcaatatggtattgctaaaataaacaaacattttccgggggtggattttgtaacctattcggtagaagaaccttgcttcacaagttgcttgccacaaatccttaaacagttcggctttaaatatgctgtattaaaatgtcccaacacctgttggggagggtatactgctgcttatggcggagaattggttaattgggtgggaccggacgggactgcaatcttgaccgttcccagatatgcttgtgaaaaactagagccgggatcaacttggcagacaactgcttggggaaattcggatgcttatttaaaagattgccgtaacgcaggtatcaaacaccccgttggtatgtgttttcaggatgcgggatggaaaaacggcccatggctgggaagtggaaagaacacaaaaaataactctatatatatgacatggagagattacattgaaaatgtctccatcggaaaaacggatgataactggtatttttcacaggaagatatacatgtgaatcttatgtggggaagtcaggttttgcaaaaaatagcgcaagaagtacgtgtttcagaaaatagaattgtcatggcagagaaaatgtctgtaatggcttatctggaaaataaatatatttgtcgacaagcagatatggatgaggcttggcgtacactgatgttggcacaacatcatgattcgtggattgtgccttataatggactgaatagaaaaggaacatgggctgatcagattaagcgatggacagacagtaccaatcatcttgcagatggaattattgaggcatctatgcagagctttaatgaaaagtttattccgcaaaataatgctcaacagcaatatatacgtgtttttaatacattaggaatgagaagaaaggaagtcgtaagtgttcttctgcctacggaatctgaaaatgcggatttaagtgtttatgactggaaaggtaaagatataggttgtttggtagaaaatgaaggtaaagagataagattattttttgaggcagagattcctccctttggttattccacgtattgtataaaaaagaaagaagccggtaagaaagaggcttcggagagtagattcgttttggaaggtaataaggtgaataaacaggaatacgtggttgaaaatgatatgtataaaattgtttttgacttatcaaagggaggaaccataaaaagcctgatagctaaaaaagaagggaataaggattttgcaggtaaaacggagaaatatgctttaggggagctacgaggctttttttatgaagaaggtaaatttcgttcttctatagagactccggccaagctgacagtagtaagggataatgtatatgagcaaaaaattaagatagagggtgagattgcttcccatccgtttacacaagtaatcactctcactaaaggaacgagacggatcgattttgatttgacggttgactggaaaaagaatgtaggtattggtgaatataaagaggaacgttggcgtgataatcgtcgggcttattgtgacgatcggtttaaactaagtgtattattcccgactgatttacatgctccctgtgtttataaaaatgcaccgtttgatgtatgcgaaagcaaactgactgatactttctttggttcttgggatcaaatcaaacataatattatacttcattgggttgacttggctgaacaggaaggcgactatgctctggctttattatcagaccatactacttcttattcttatggagaggactatccgctaggactgactgctcaatattcgggtggaggactttggggacctgattataaaataacacaccctttgaggatgaagtatgcaattatacctcatcgtggcaaatgggacaaagcatcaatcgcagatgatagcgattgttggaatgaaccattgctgtattcttgctatccagtggcaaaaccggaatcgaaatcatttattgatttacagaatactggttatcaagtgagtgctcttcaaatgaaagatggaaaggtactattgcgcctgttcaattctgaaggagacgaaagattacaaaaggttaccattgacatgccattatccggagtggaggaagttgatttgcatggacaatgtatcgaaagaaagaagataaaaacacgtgcaggtaaatcggaaatgacgatttcaatgcctcgttttggtattaagactttcgttcttagtttgacttaaaataattagattattgttatgtataaagcgactgctaatcttttaattgtttgctttttgtgttggatgacgggttgctcatcaaccaataccgtatcggaagatttggttccgactgattatgtaaacccgtttattggtgccagtactagtgtaggggctgccggtgtttatcacggattaggtaaaacttttcccggagctacgactccgtatggtatggtacaggttagtcctaatacaataacgggaggtgataacggttccggatacagtgatgaacataagacaatcgaaggatttgcttttacccagatgagtggtgtgggatggtttggtgatttgggcaattttcttgtgatgcctacaactggtgaattatataaagtggcaggtaaagagaataatgatagtataaaaggatatcgttcggcttataacaaagccactgaaacggctaaggccggatattattcggtagaattgactgattatcatatcaaagtagaaagtagtgcgacaccgcactgtggaattttacattttacttatccttctagtgaccaatcgcgtattcagattgatttagctcgtagagtagggggaacatctacttcacagtatattaaagttgtagatgattacactattcaaggatggatgaagtgtacacctgatggtggtggatggggtaatggtgaaggaaaagccgattataccgtttattattatgcacaatttagtaaacctttgactaattatggcttttggagtgcagatattcccgaacattgggttcggaaacgtgatgaagtagtgagtattccttatttgactcgtatatcacaagctccggttataaaagacaagaaagaactgacgggtaaacatctgggcttttttactgaatttccaacgaaggagggagagactgtagagatgaaagttggtatctcttttgttgatatggagggtgctgcaaataactttgaacaagaaatagcctctaaaaattttggacaagtaaagcaggaagctactgaattgtggaataaagaacttaatcgtgtccggatatccggtggtacggatgatgaaaaaacgatattttatactgccatgtatcatacgatgattgatcctcgtatctatacagatgtagacggacgttatgtaggcggtgattataaaatacatacggctgacagcacttttacaaaacgtactatattcagtggatgggatgtatttcgtagtcagtttcctttgcagactataattaatccgcgtttagtaagtgatgaactgaactcattgattactatggcagatcagagtgggcgcgaatactatgaacgttgggaattgctgaattcctattccggttgtatgttgggaaatcctgctttgtctgttttggcagatgcttatatcaaagggattcgtacgtatgatgcagagaaagcgtatcgttatgccgttaacacatcccgtcgttttggaaatgattcattggggtatgctccggaaccattgagtatttcaaccactttggagtatgcttatactgattggtgtatatctcaattagcgaaagctatggggaaagaagacgatgccaaatgtttctatgaaaagggacaggcatatcattctatttttgataaagaaaagggatggttccgtcctcgcaaagcagatggaacatgggtagaatggccggagaatgcacgtcttaaagaatggtatgggtgtatagaagcaaactcttatcagcaaggttggtttgtacctcacgatgttccgggaatggtgaatttgatgggtggcaaggagaaagttattgcggatttaacagatttctttaataaaactccttctaatatgctgtggaatgaatattataaccatgcgaatgaacctgtgcacttcgttccttttttgttcaatcagcttgaagttccctggtatactcaaaaatggacacgctatacatgtgaaaaggcttatgcaaacaaagttgaaggaattgttggcaatgaagatgtaggtcagatgtcggcgtggtatgtgttggctgcttccggtattcatccttcctgtccgggaaatacacgtatggagattacaagtccggtttttgataaagtagagttcaatcttgatcccagctattatactggtaagaaattcacggtgatagctcataataacagcataaataacgtctatatacaaaaagccttgttgaacggtcaggaatacaataaatgttatcttgattttgcggacattgtagccggaggtacattggagctgtttatgggtgataaacctaatgttgagtggggactttgattgaataacatactctaaaacaaattgttactttaaaatcttgatagtatgatgaataaacttgggcttatcattgtatcggttatattggctctaatccagacagggtgtgcagagcagagtacatggatgtctttgaacagctctaatcctcggattatctgggaagtgaaaccccaggcagatttagagaacataaccggagaacagatttctactccggaatttaaaatgtccgattacgttaaaggtgtggttcccggaactgtttttactgcttatgttgaagcaggaatcgttcctgatcctaattatgccgataatatttataaagtagacgaaacgttttataaccgtcctttctggtatcgtacggaattcgaacttccgtcttcttattcggaggggaagcgggtatggcttcatttcgacaatacgaaccgctttgccgatttctattttaatggcgagaagatatcaggaacaaaaacatctactaaagatgtaagcggtcacatgttacgttcgaagtttgatgtaactaatctgataaagaaatccggtaagaatgtaatagctgttctgattaccgatgccgatcagaaaaagacgcgtaaggctaaagacccgtatggagttgcgtgtagccccagttatctggctggtgccggttgggactggatgccatacgtaccgggacgtctggctggtatcacaggcaatgcttatcttgtggtaacgggagatgtagtgatggaagatccttgggtacgttcagagttaccgaccttgcagaaagcagagctttctgtctcaacagatattagaaatgcttcttcttccctcaaagatgtcgttgtatccggagtgattcagccggggaatatttctttctctaaagacattcgggtagaaggaggaacaacagccagactatctattaacaaagatgacatagcgcaattggtcgttgaccatccgaaactttggtggccgaatggttatggtgatcccaatctttatacttgtaagctgacttgttctgtagatggaaaagtgtcggatgtaaaagaaatgacgttcggtatcaagaagtatgagtataaaatggtcgataatgtagtgggatatcctgttcttacattctttatcaacggacagaagatctatctgaaaggtggaaactggggaatgagcgaatatctgcttcgctgccagggtaaagagtatgaaacgaaaatcagacttcataaggaaatgaattacaatatgatccgtctatggacagggtgtgttactgatgatgagttttatgattattgtgataaatatgggattatggtatggaatgatttctggttatatgtagcatacaatgacgtggcgcaaccggaagcatttaaagcgaatgctcttgataaagtcagacgccttagaaaccatccttctattgctatttggtgtggagcaaatgaaacgcatccgacacctgatttggataattacctgcgtgaaatgattgcgaaggaggacaataatgaccgtatgtataagtcttgctccaatcaggatggactgtccggaagtggttggtggggaaatcaacctccaagacaccattttgaaacttcaggcagtaatctggcatttaatacaccggcttatccatacggtattgatcacggttacggtatgcgtacagaaataggaacggccactttccccacatttgaaagcatcaaagagtttatcccgcaaaaagactggtggcctctgcctactgatgagcagttgaagaatgatgatgacaatgtatggaacaaacatttcttcggtaaggaagcgtctaatgccaacccggttaattataagaattcagtgaatacacagtacggagaatcatccggactggaagaattctgcgagaaagcgcaaatgctgaatatcgaagtgatgaaaggtatgtatgaggcttggaacgataagatgtggaatgatgcagccggacttctgatctggatgagccatccggcttatccctcgtttgtatggcagacttatgactattattacgatcctacaggtgcttattggggagcaaaaaaggcttgtgaacctttacatatccaatggaatgcttccaataacaatataaaagtaataaatactacagcaaaggacttgaaaggtgcaatagctaaagctacaatttatgacttgaatggaaaagaagtgcctgcatacggacagacaaaacaggtcgatgtggcagccagcaacattgcagaagcattttctttgaactttaaccctttcaatctggcttatggaaagaaggctgtagcttcttcttcaacaggtgcctctaaaagtgcttcaatggttactgacggaggagccggaagtcgttgggaaagtgcatacagtgatcctcaatggatatacattgatcttggtaaagaagaaaagatagaaaaggttattttgaaatgggaggcagcttgtgctaagaaatacgaactgcaagtatcgaatgatgcgcaagaatggaaaaccgtttatgccaacaaagatggaagaggtggtactgaacagattgaattggaacctgttacagcacgttatgtgaaattggcaggcatcagccgtgccacacagtttggatattcattgttcgaattcgaaatctacggtgagaaaccaaaagagatagaagaactgactccgcttcattttatcaagttggaactgacagatgccaaaggtaatctaatctctgaaaacttctattggcggaatggcgtgaatgatcttgattatacattgctgaatacacttccagaggccgatttgtcttgtcgattggtggataaatcgatgtctgacggaaagatgaagatcgctgtaaagaacaattccgagactgtggcttttgctaatcgggtgaggcttgttaataaggatacgcagaaaagaatacttccaattattatgtccgataattatgtgacgttgatgccgggcgaagaaaaggttatcactatggaggcgactcccgaactgttgaaaggaggcgtaagtgtattggtgaaacagtatgggaaagcagagaagaataagctggatatagcagattgattgttgtacggttatctttatggtttgattaaaagaataaagaaaatggctaatagactaaaaatgaggatactcttgttgttatctttagtttatataaattgcgattacttacaggcacaaacaacaatacctcggtttgaagaaggggaacgtgtggtatttgtaggaaacagcattactcacggcggacattatcattcatttatctggctgtattacatgactcgtttcccggataaaccgattactatcatgaatgccggaattggtggagagagtgcgtgggatatgaaggatcgtttggactatgatgttttcaacaggaaaccaacttatgtgactctaactttcggtatgaacgataccggttatgatatttacatgaaagacgatgcaaaagaactgtcggaacaacggattgcaaagtcattggaaagctatcgggaaatagaagaacgcttactggctaaaaataaaataaagaaagtattgattggcggttctccttatgatgagacttcccggtttaataattttatattgcgtaataagaacaacgccattttaaaaatcatagatgcccaacgtacatcggctaaaaagaatggctggggttttgttgattttaaccaaccgatgcgtgagataagcagaaaggagcaggaggcagattctacatttacattctgcaggatagatagaattcatccggataatgacggacagatggtcatggcctatttgtttctgaaagcacagggactggctggggatgaagtgtcatcagtatctattgatgcacatcattcatctgtaataacccataagaactgtaagatttcaaaactaaaaaagagcggagctgatctgacttttgattatctggcgtatgctcttccttatccgctggattctatttctagaagtggctggggaaataaaaggtcacaacgcgatgcaatgcggttggttccatttatggaagagtttaatcaggaacgttttcaggtaacaaatttagagaaaggaatgtatcggttaactatagacaatcagtttattgacaatctctcatccgaaaagttggcgaatggagtgaatttggcagattacccgaatactccccaatatcaacaagctgcgaaaatcatgtatctgaatgaggaacggtttgaagtggagaaacgttttagagaatacttgtggaccgaatattcattcttgaaaaaggaaggattattgtttgctgatgatcagaaagctatcgataaactaaaagaatatttacctaaagatgggtttctcaggatgagctacgactggtatataaaagcgatgaatcccgaaatacgggaggtttggagcaattatatgaagactattgttgaaacaatttataaaatcaataaacctgtcactcataaagtgaggctggcaagagttgaataataatagaagatgaatagaatgaaacgattgttatgtttaggtttgatttgttatttctgttgtctgtcgatgatagtatatggaaatgagaaaacttcgcctttctatttggcggaattaaaatgtgagaatcttattgatcctttggggattgataatgtaactcctcacttcagttggaagttaaagggggacggctggaaaggcgggcaaacttattatgaaatacaggtagcttcggatagtattctgttggtgcaggataaagctgatttatggaataccggaaaattgaaatccaaaacttcggttatggtaccttatcgagggaagactttaacttctcgttctttgtgttattggcgggtacgtgtttgggatgctaaaaaacaagcttcatcatggagtcctgttgcccgttttggagttggcatcttggatcagtcacagatgaaaggagaatatataggggcttctgttgaaggtggtaagatttgtgctcctattcttcgcaagaaagtgaaattgactcagggagagacttctttcctgcatgtaaatacgttaggttatcacgaaatttatatcaatgggagaaaggttggggaggacgttctgacccctgctgtatcacatttatctaaacgttcactaattgttacttatgatattactccttatttaagagaaggagaaaatgatttgcttatctggctgggacaaggttggtataaaacgacgactttcggagcagcttatgaaggtccgctggtaaaagcagaattggatgtgttgagaaatggtaaatgggaagtcgtaacgaagacagacggatcatggtacggacgtgaaagtggctattctgatacaggtacttggcgtgctttgcagtttggaggtgagagggtggatggaaggattcttccgcgagatctttcaacacaggctttagacaaaatgaaatggactcctgttgtgaaagtgaatgttcccgatcatatcacttcccctcaaatgtgtgaggtaaacaaaatacatcagattttgcaggctgtttctgtaaagaagctgggtgaaagtctctggctggtagatatggggaaggttcagaccggatggtttgagatgcaaatgcctatattgccggcgggtcatgaagttattatggaatatagtgataatttgacgaaagacggtgaatttgacaagcaaggtgaaagtgatatttatatatctggtggtaagcaaggagaatacttcagaaataaattcaatcatcacgcttttcgatatgtgcgcatttccaatcttcctcaaaaaccggaaacaggtgctatgaaatctctgcagatttatggagattataaacagaccgcaacttttgaatgttcggatgccgacttgaatgctattcaccaaatgattcagtatacgatgaaatgtctgacttttagtggatatatggtagactgtccgcatttggaacgtgcaggatatggtggtgatggaaactcctcaacgatgtctttgcaaacgatgtacgatgtagctccaacatttgaaaactgggtgcaaacatggggagactccatgcgtgaaggaggaagtttgccgcatgttggtcctaatccgggtgccggtggcggcggtccgtattggtgcggattctttgtacaggctccctggagaacgtatgtcaactataatgatccccgcttgattgagaaatattattctcaaatgaaagagtggtttaagtatgttgataaatatacagtggatggtttgctgaaacgttggcccgataccaaataccgtgactggtatttgggtgattggctggcacctatgggagtagatgcaggtaatcaggcttcagtggatttggtaagtaactgttttatcagcgaatgcttgagcactatgtataagacagccttaacattaggaaaaagagaagaggcggaagagtttgctatgcgtagagaaaaacttaacaagttgattcatcagacgttctaccgtgcggatgaagggatctattctaccggctcacaattggatatgtgctatcctatgttggtaggtgttgtacctgattctttgtacaataaagtgaaagagaatgttgttatgctgaccgaagaaaaatataaaggacatattgctgttggtctggttggagtatctattttgacagaatggtctgttcggaataaacaagtggatttcttctatcaaatgatgaagaaacgtgattatcccggttatctgtatatgattgaccatggtgcaacagcgacttgggaatattggagcggagaacgaagtcgtgtgcacaattgttacaatggaattggtacttggttttatcaggctgtaggaggaatacgtcttgacgaggctacccctggatatcgtcacttctatgttgatcctcaaattccaaacggtgtgacctgggcaaaagtaacgaaagaatcaccttatggcacaattgctgttaattgggaattgcaaggtaagcaattgaatcttcaattgacagttcctgccggaacaacggctacagtttgcatccctaataatgctgtctcatgtaaaaagaataagaagaaagtgagcgttaaggagcagactgttgatgtagaagcagggcattatgattttctatttaatttgaaatagataccctactagagtgtatttatgattttcatttctcatattctcattcattaatcataaatggcagaagactaataggatagactatgagaaatgatttttaagatggtatttctcatagtttttccgtcaaataccccgtattttaccttatttctcatacttgttggattcatttctcatagtgtttttccaatcaacctatacaagaataaagaaacaactagtcaaccattatcagggaagtacatattctccttgtcccatatattgtgggaaagtgttccctactagtagggaaaagattctcttattttgtgggaataaattctcataatattagggaacattttcccataatatatgggaaaatcggaactacagtttatcttcaaccagaaaaaaggagaagatagtatttgactatgagaaatactctgaaatactatgagaataaggtgaattttaagctaaaatagaaggtgtattatgagaaataccgtcttagaaagtatttctcataagctatttatttgattatttgctgtttatcagtcacctatgagaatatgagaaatgaaatttaaaaatcttctctagaggctgctgaattttttattgatacatttaaaaacgcaccgtaataaactaaattatcatttaatttaagtctgtgcagaaacaaaattaactttaggaaaattgtccagtgaatggacttgaagttaatcgctttgattattatttttatatgattctttttaaatttctctttagtggtttcttaaatttcaagcgttcatagtataaagttcaatagatataggtaaaaagttaggattggtgtttgaaattccacaatattcctccggtctgtttattcttcttttatgagtgaccggaggagttgctggaaatcctgtttgaccaaaatgaaaatatgatatcatgaggactgttttccaagcttttgataatgaaattgccagactaaaatccgttggcggaactaataactaaaataatatttaaatgagaaaaagaatatcgttattgcaaatggctgttttcttctttacggctcaggtagcttgggcaggtaatataaaaacagaaaaagtaacactggtaggaaatggaattgtagaatttatccccgtagggtatgatgtttcccgtacgccttcattaattctctcccatgaaccggaaaagaaaggtgaagtaccggaaaactggaaattagttcctcaatttacgatgactgatggcaaggcaaatgcctcattggatgttccagccagaacaagtctgtatggaggtggtgaagtgaccggtccgttgctacgtaatgggcaaaagattaaaatgtggaatacggataatggtatgtatcgggttgatggtggctcacgtctgtatcaaacgcatccgtgggtattgggtgttcgtccggacgggacagcatttggcgtattgtttgatagtttttggaaggctgaattgattactaattcagataaaattgaatttaatactgaaggagcaccttttcgtacttatatcatagatcgtgaatctccgcaagctgtattaaaaggacttgccgaattgaccggtactataagtatgcctcccagatgggcaattggttatcatcagtctcgtttttcttacgtgccggaagctagagtgaaagaagttgccaatacttttcgtgaaaagaagataccgtgcgatgtaatatggtttgatatcaactatatggatgaattccgtgtattcacaatcaatgacagggattttcccgatccgaagcgcatgaataagtatctgcatgataatggattccattccgtgtatatgatagatccaggcgtaaaagtggatgataactattttgtgtataaaaccggaaaagagcaaaatgcttttgtttgtgatatctatcgtaatgagtttcacgggaaagtatggccgggtgcttgcgcatttcctgactttacccgtccggagacgcgcacttggtggtccggactttataaagactttatggctaatggaatagatggcatttggaatgatatgaatgaaccgtctgtatttgatggtcctgggggaacgatgccggagaacaatattcatttaggaggaggcaacttacctattggtagccatttaatgtatcataacgcttatggtcgtctgatggtcgaagcttcttataatggcatgatggctgctaatccaggcaaacgtccatttcttctttcccgctccaatattattggcggacagcgttatgcagccatgtggacgggcgataacgaagctacttatgaacacatgaaactttctataccgatgtctattacattggggttgtccggtcagcctttcaatggtccggatataggtggatttgctgggaatacgactcccgatttgtggggaaactggttaggcttcggtgcatttttccctttttccagaggacatgcttcctgtgatacaaataacaaggaaccgtgggcatttactaaagatatagaaaaggaatcacgcatggcattagaacgtcgttaccgtttgctgccttatctctacactgcttttcatgtggctcataaagatggacagcctgtgatggctccggttttctttgccgatccgaaagatgaaagtttgcgtgctgaagagcaagctttcatgttggggacagacctgttgataattcctgcatttgcaaagaatccttctctacccaaaggaatttgggaaaatttatctttggttaaaggagatacaaaaggtaaatatcaggctaaattaaaagtgagaggtggttctattattccagtaggcaaaataattcagaatgtgaatgaaaattcattcgacccattgactttagttgtttgcccggatgaggatggcaaagcggaaggctctttgtattgggacaaaggagatggatggggatttcagaaaggagattataaacagctaacttttaaagcagagttagtagacgggcatcatcttattgtaaaagtgacagaagataaaggggaagaccaaattgattttggaatgataaaggtagaagtattgcatgctggtcatacttataaatcttctggtgatatagctaaaggcattacagtgaaattgtaaaggagaatacaataaatgaggagttcgtttatttaaccatcttctttttgtactgtttagaactaaacttcatccttataatctaaatgtgattactaaaaatagcttccagtcaaaaacatcagtaaaaaaggttgttgactgaaagcgaaccgaaagcaaaaaagagagatgagttcagtctcttttttagagcctctatattcgttcaatagagcctctgtttaagtgaaatgcaggcttcgtttcacttaaacagaggctctgttttattcacctgacgcgttctttgacttgttgtaaacgaaaactattcataaataatgtgttagagattgaagggaaaagtgtacctttgcccatcgtttaaccggagaagacaagatggccaaaataacagtattgactacagacatcaatgtagtgtctattaataacgaagattacatctgcattactgacatgctaaaagccaaagatggcgatttcttcatatcagactggctgagaaacaggaatacactggaatacctcggtatatgggagcggttgtataacccaggatttaattatggcgaattcgccacaattagaaatcagtcggggttgaacagtttcaaaatcagcgtgaaagaatacgtggagaagacccatgctatcggtattcaagcgaaagccggaagatatggaggcacctatgcacacaaggacatcgcatttgaatttggaatgtggattagtgctgaacttaaaatctatttagtccgcgagttccagcgccttaaggagcaggaactcgcgcaactgggctggagtgccaagcgagaactgtcgaaaataaattaccgcatccacaccgatgctatcaaacaaaaccttatcccggcagaagtcacaccacaacaagcttcccgcatctacgccagcgaagccgatgtgctgaacgttgccatgttcggcctcactgccctcgaatggcgcgatgcgcatcccgacctgaaaggaaacgtccgcgactatgccacggtgaacgaattgatttgtctctcgaacatggagaatctgaatgccgtattcataggagaaggacttcctcagcacgaaaggcttgtccggctgaaccggatagctatccagcagatgcagatactggaagatgtaaacaagaaatacctcaagtagctgcttttaccagaatgaaccgatagatttttagcacggcaactataatagttttcgtcccgccccgcacaccgacttgtgtgtggagtgggacgttttcgtttacggcaagccatgtacccctacatgtgcggattcggcttcttatcaaataataatgcttgatttacaatgtgttatcaatgaaaaaaggggatgcatctatgaagacgcatcccctttttcattgatactactatgagtatttatcagtttattagaatgtaagttgtactcctaagttaaacacgcgctggttcatgtatgcatcaccggcggagttggacttgatttccgggtcttgttgatacttatcaaaacttgtccatgtaaacatgttgtaagcattgagatagacacggaggtttgtaagccatgaaggcaacacttttgtgggcacttgataggagacgtcgatggttttcaagcggatgtaccaagcatcaatcaaccaaaagtcggacatatacgctgctgcgctgtttacagttgacggattgcttgttaagcgcggaaattcgatggcttcaccgttcaggtagcgttctaatgtccagcgtttctggtgtagaggttggaattgactcttgaaaggttcgatacctgtgccgtttaccgagaaactgtagttgaacgaaccttggaagagtacgctcactgacaatcctttccacgaaccaccgattgtccatcccaacgtggtgttgggtaagtttggcttaccaatagctcccttgtcgaagtcgttgataacaccgtctccgttcaaatctttgtatttcaagtcaccggcttggataggaacgtcggtattgggcacagccggtgcatttgcggctcctgcatgaatcaagtccacttcttcaggtgtataataacctatccaagtgtaaccgaatggttgaccgataggacgacctgttgccgacaaccaatcgtatctttgttgtgcttcggcattaaattctaccttattcttagcatacgagaatacgaagttggtattgaagttgaactcaccgaaacggtcttgataaccaatctgtccgtcgaaacccatattgctggtgcgtgccacgttgataggtgaagtacccacacctaagatctgcggtatgtcattgcgtttcacaagctgattgtatcgtttgtcatagaaccagtcgaaagtaaatgagaagcggtcgaatgcattgaagtcgagacctatatcaaacttcttggcttcttcccatgtcacactgctattaccaaggtcaccttccgtaatagcagtggaagtgacatcgctttgtccgaaattataagcattatcagttgctgtatatatctggttgtaaaggtagcggttacccatagctacgtccgaacctacaataccatacgaagctctgattttcaatagttggatgaaagaaatgttatccttgaagaacgattcttcggagatacgccaacccacaccaatagcagggaatattccgtagcggtgtccttcggcaaaacggtcggtaccgttgtatgcaacattgaagtcgaccagatatttatctttatatttgtaacctacggtagcggtaagaccctgaaagttttcgggaatcttttctcctgtatcgtctggatttttttctacggtacggctttggcggctatacagtaacgtggcactaacgtcgtgtattccattgaatacgcgtgcatagttgatggaggcctgaacatccagatttttcacagcctggttggttccggccgtcagagcatactgtgaataagcatatttacggttggggttgatgttatactgatccgtagtaggatcgtagtggtaggtagggtacgcatcttttccacggtttactttgcggaagacttcgtcaatggtagagtaagcaatacgagcattggctgacaatcctttggtgagccaatccatcttccagttcacaccgtagagaatgttgttatcgttacggcgtgtacgcgtgtaaccttcgttagccaaacgtgcattcaatgtaggtccgtaaccgtccacatctgaaagataagcatacgatccgtccggattgagtaccggtgccgaataggggtgcatggcggtgaaattgtaaatctcgcctgtagcattcagactactcggttcgttgatgttcatgaagcgcgaactgaagtccagacgcatagtcagattatcagtaacagtaaagtccaagttggtacggtagtcaaaacggcggtaaaaatagccggtattcacatcgtcatccgctttagcaaagttacgaaccaaaccaccttgtgagaaataacccccggatacgaagtatttcaaacgtttggtaccacccgatacgtcgacattgatgttcgactgcatagccgattttttgaacacttcgtcgtaccagtttacattaggatgtccgtatgggtcggaaccgtctttaaacagttccaaatcatgttgtgtaaacattttagtcaaaccatcgttagtacgtgcctcgttgactaacagggcggtgttgtatgagtctaagaagttgggtttacggacaggtatctgaccgccggcttctgcacgcacatggatcacaggttttccttcttcaccgcgacgtgtcttgactaccaacacaccgttagcacccttgataccataaatagcagtcgttgatgcatctttcaaaatagatatgctttcaatctcattgacattgatttgcgacagctgttcgtaactgtattccacatcatcaaccataataagtggcttgttaccgtcctcattcaaggaactgacaccacggataaagaagtcggaagcatcttttcccggctgaccggaacgttgctgactgaagaagccgggcagtttacccgataatgtattctgtaagctacttgtaggaactctacgtaattcgttggcttgaataccgctcacggcaccggtcaaagtgatacgtttcgcgctgccgcgacctgtgataacaacttcgttcaggttgttggcttcggaaacccttaatgcgatattcagtgtgcgctgatttgttattgcgacttcctgattttgatagcccacaaacgaaaataccaatgtttcgccacgtttcacttccagcgaatattttccatctatattggtgatggtaccccttccggctccctttaccagaataccagctccgataagcggttcgttgctttccccatcaataatggtaccgcttatcgtaaacgattgggagtatgcctgtacaatgcagaggaggcacaagaatgttataattactcttttcataagatattaccaattagggttttgaaccatattcttattttttattacttccgaataaggaatcggatagaaataacgtttattgtcccattgtacattgagtacagcttgcggaacataggtcgtggaagtctgtgatttagtgatgtacattccttgaataggctgtgcatagacctgttcggcaagtcgccaacgacgaatgtcccaatagcgatgctcttcaaaagctaattcaatgcggcgttcattctgaatcactttgcgcatttcggcttgcgtcaaattgtgtgtctgctcattggttgttagtccatacaaattcttttcaccaggttcgatgcctgcacgtcggcgcagggcgatgatagcatcatatacagcttgcgaaggagtagacaaatattcgttttcggcttcggcaaagttcagaagtatttcggcgtaacggaacatcacccagttgtgttgtgtgtcttgatattcgttggctgcttcgaaatcacccataaacttgcgcatgtaataactcgtgagcgagtatgacgaaccaagaggattattggctccaccttgccaagtttccatcgtagagttcacccatgacgaaccattgtgtataatggtatattccaaacgtggatcacgttgtgcgtaaggaagctgttcattgtattcatatttacctttatcattgataaagtgaccgtctttcattaaaaaggcatcgactaaattctgtgtgggattggtgcggccgtttccttgtttggcaccgctaagtcccaatggaccgttagctgtttccaccgtcttatccattgcgttttcacggaagaagataacttctttatgttcgtttgaataccaattggtaaatacatttttgaaattatcgtcaagtcccatgatagctccgtcacctgttccgtacgtgttaataaagttgcgggcggcatcggctgctattttccaacgttcgcgatcataagaggcatatcctatcaactcattaccagattcaatgggcttttcgttgaataacggacttgctgcatagagcaatacacgaatcttcagtgcctgggcagcctgtgtgtttactacgtgtgcgctagcggcggcgtcaggtagtggcagcgaacgaaggtcatctttgatatcgtcaagctcacttacaatatacttgatacattgctcgaacgtgctacgtggcaattcgatgttttcgttcaattcgtacactttatcaccgataatgggcactccaccgtagcgcttcaccaattcaaaatagaagtaagcacgcaggaaccgggcttcggctttcatagaatcattgagcctgcgtgtattaccgagtgcatcagtgtaagtagtgttgaaaggtactacgtcaatgccactcaacagaatgttcacgcggcgaatcaccaaataagggtcgctccaaatcatatccgagttaataaaattggaggcactgtaacgtccgatggccagtttgtatacatcggactcggacgaaataacagagagcgcatcgtcggaagcggcatccaggtagtcaccatttacgccgttgtgtccattacgcatgtaatagtagatgcggttgaggtatttacgtactacagttccgttggagtcggtcttcgagaagaggtaatcttctgtaaacatatctacaggcgtactctcataactgtctgtacatgcggcagcactcaataacagcataaatgctcctactgcccatgtgccatatttattttgtttcatatccatcatttttattagaagttaagattgattccagtcgtaatggtgcgctgtaacggatagctggtgaaggtaacttcagggtcttgcaaacgggtacgtgaccatgtgagtaaattttgtccctgtacaaatatcttcacgcgcagtccgcctaagtaattacggcagaagttttcgggtagtttgtacgatacggtggcgttcttgagacgaatgtagtttccgttctgtacaaagagtgaagagttccagttgtttccgtagttgtacatattgcctccggcagtcagtctcggatacgtagctgtttcagctgtttcgggtgtccaacgattcagcaaattggtgtaagcttgtccgtagctttgtccgatcacttggaacccttcgagcaacgtgcggtcgctattatataagtcgcggttgtaagcaccttggataagtgctgtaacttccaaccctttccattcaaagcctaaatcaataccaaaatagcaagtcggtttgtcgccaccaatcacagtacggtcgaattcgttgatttcgccgtcaccgttcatgtctttgtatttcacgtcacccgcttgaatattgttgaagccgttcattacgggataaccatcggctatatctttagctgtgaggaatccggtagctaccaatccgtagatggtaccggtgggttgacctgtcattttcagatagtcgtaaggtacgtattgctcgtccatgaacaaccgtttgttctgttccatactccagttggctgatacataatagttcaccttaccgatgtgatcttgccagctaagttgtgtttccaatccgtagtaacgtgtttttccgatattttctgccggataagcaatacctaataattggatacttttaccacgtgattgcaaaatatcgtagtagtagtcattgtaatagtcggccgagagagtcaaacggttctttaataaggttaaatctaaacctacattgaccttccttcctttttcccatgtcaggagggtattagccaatggggatatttctgacactgaacctccgttgctcatggatgtaccgttgctataccagaatccgccatcttcattgtatctctttaaatagctgaagtaaccggcattgtcgattccgtttcctgtatgaccgtatgtggcacgtaacttgagttggtctatcttcgatgcctccataaacttctctttgctgatatcccaacccagacctactgcccagaatgttccccagcgacgtccattgtcatagcggttgtaataactttccgttacggctgcttgcgcgaagtatttgttatcgtaattgtattcaactttctgtccgatgttcgacggaatcataggcaggtcgtagttgttgagtatagtacgtgtatcgccccaaagtgaagcttttacaccatgcataccgaattggcgttcccagtctacatacattttgccatacatatattggtacgtcgatactgaacggtaactgttggtttgtgaactcacatctccatacttgtcataagcctcgttgccttgttgggttatgctgtattgaaatacttgtgcctgtttggtacgaacgatagcattgcgcacttgcgatgagatgtttcccgttgcaccaacggaaagtcctctcaccaatttatcgaagtcatatttcaaattaatggttcctacgacgtcgcgggtattgcttgagatatatcccgaaccagtggtctgtgcatagagattttgggtatacgaagcgttaccaccatacgtaccgttgggatttaagacgggataagcattgttgggagtctgccatacgttgctcaaaaggtcgctgtatcctgtccccgaaatacctccaggttggtttcctttttctatacgtcccattaaagacatgcttaccttaaattcatctgtcacgttgatgtttaccttcgatgtgatgagataccggttgtacttgaaattggtgttgtagctattagcatcgctcgtcttgaacaatccgttttcgctgtaatatcccaaacttacaaagtattgagccactcgtccgccacctgttacattcaggttataggcttgcgacgtagtagaattgttcataatagcatctttccaatttacgtcgggatgcagataaggggaagttccattacgataggcttcgaaatcatcatacgtatagagtggtgatttgccatcattgagcaatgcttcgttgagcaaataagcatattgataagccgaaagtggatttgggccagatttcaatgcactggatataccaaactttccggtgagtgagagatggaaaccaccttttgcatcaggatttttggtagtaataatcaatgcaccacgtgaactgcgcattcctaaaaacatattggaaagggcatccttttgaatggtaactgattcaatggcttcgggatctatggaatacaggtcacgttctacaccatcgacaatagctacaggcgattgtccgcgtgctgaaatgagaaactccgaattatctccgtagatacctccacctacattaggaatagctcccactatatcggatttagtattggcatcagtccgtaacagttgcatgccacggaaaggtgatacattaagacctttcaatcgtccttgcaatccggtaaggatggtggctgactgatattttatcaagtcgttggtataaaccgtcgaagatgcccctagggtattacttttagtgtgatccacactgtctatcggtgcatcttgtgcctttagtgcgacggcagctatacatagtagtcccgtcgttatcattttatacatattctgtttcattatcagtagaatataaggttatcactcgcaatagaacgtatatatgaatggttccttctgcggaggaagaggtatatttaacattacgaagtcatcatcagactgtgtaacggagatagatccatcggcattagtgaaggcatattcaatacttacaagctctgttccttcaggtacattgaagaacccttccggccagaatgtgatattgtatgttttggtatactgattctctcgtttcatcagggtcttgtcactcttctcatttacggtataacggtgtccgtcgctagctaccgccgttccttcaaaatagatcttatcggccttgacaagtgcatttttgtcgtccatgcctcctatgaagctaaaggttacaaagtcgttttgcaatgctgttaatggagtggttttgttgaagtgttcgctacagaagtcagtgacaagtccttcaccttctactacctcaaaacatccggcttcctcacatttctttgcatctgcacttgtactgaagttatcgtcagtactgttaataaagaatgatggtttgaaacgcagatttttgtttcctaccggtacacggacatagattgtaaaatgaatttcatctgcgacaccgttatagggtcttgtccaataggctgcccattccatatcttccagaatattggtaccgacaccgtattcctgcatgagagcagccgaccacgacaatcctggtttgttgctaggttgttcggtcaataggataagcgtcatgttttgctcacctatattcggatcaaatgtatcttctgtgtacgaaaccctggcattttgtgccagattccaactcttaggagccaaaaaaccgaaaacaagtcgtttgtcattgcgtgggtctccttgaaccttaatgtgtccatgcattttgaaagtagcagtcgttccggcctttgcatagtttacggcttttccatctatcatttgggttatatcgacagaatcgataaagaggcaactcataacgatgaaagtcataagtatagttgataacgctacgatgtgccgtttgcgttgaagcaagctgattaatttctttttcataaagcgttatgatttttagttttctgatattttcttgaatacataggtgtaggtattcgaaccacacccggggctatgagtaatcacgatgttacgttcgccattggtaatggggaataggatatcggtactggcctgctccgtggctccatcctctgtgaaatagaggcgaaaaggataatagatatcgtcaactttccacgtgccattgtggcgtaccacaaaaggcagatagttttcaattgtgtacttaccatctttcttcaggttaatttggaactggctgaagtccatggtttcggtaatatcattactgttgcggctcactgtggtgagttgccacgtgcctgatatgtctttgacctgctccgtgtttttgtcaggatcagcaggagcagagaacgtatcacacgatgtcacaagcagagtagtcagcaaggctattgccgccaaatgtatgctatgtttcatatttagggtattttattaattatagtagggattctgtagcaaatctttcgacttcaccgtttcattgtaaggaattgggaagaagtacatagccggacgccatacatgcgtgcgtacatcaaattctttccaagtctttgttccgtcagtggcgcgagtgatttcaatgccatgcatggttttgctttcggtttgcggagcaatcatccagcggcgtacatcaaagaagcgatgcccttcaaaagcaaattcaaggcggcgttcttcctgaatggcttggcgcatctgtttttgtgtcatattctttttaagtccatacataccatctgcaccgggctcgatgccggcacgcttgcgaatgagttttaatataggatagcaaccaagttgttgtccacctagtgtttcttcgaaatcgggaccatgatattcattggctgcttcagcatacatcagtaaaatgtcggcgtaacgtatcagtggatcgttgtgacggcttgggttccatgtactacctttacataagcgatcacatcccttgcgtacatagaaaccggtggcagtgccttggtatacggcatcgcttgtctgccctacgccaatccatgtgttaacaactgtggtagcactgtaagtatcgtcggcagggaccaaagcaccatcataaatcacggtgttgttgaaacgtggatcacgattttgagcgggattcagaggatcgaatgtgtattggctgttgtcaatgggtttaccgtcaatcatagggaaggcatctgccaattctttgtatatatacccgccgtggcgtgttccggagtgactgccactaggtggatagtaagcagcttcatgtccggactcacgttgatacttacggtcgaggatattgccggcaaaggctccgttattgtttttaccatcatcatcggttaaattggcatttcgtgtatcgccggcttggaatacgacgtagaatccgaaacctggttcggctttgccgttcaaatctttacttctaataaagagattataggttcctaggttgattactgcgcgggcagcatccattgccgttttccaacgttctttatcataagagggatagcctactaattctttggtatcagtaggagcgaaatcacttccattgaataatggactagctgcatagaggcagacacgggctttaagacccaatgccgctgccgatgaggcgcgaccgttttcttgacctgttcgtcgcacgggaagtacattgagttggacgatagagtcacattgatgggacacatactctacacattctgcccatgtattgcgcgaggttttcattgttgaagtggcatcatacacgttattaccgataataggtacaccaccgtagtgtttcatcaaaatgaagtagtaccaggcacgcaagaaaagtgcttcggatatgtattgagctttccggctttgtaccatcggtgatcggtcgatgttggcaaggaatacgttacaccggcgaatgttagtgtagcatttcgaccatgcatcatcactcaccgtaaccggattaaccgtaccggtagcaaacatcatgtttgtccagatggttgacgaaggataaaattcagcttcgtcacaagcgctttgcagcccaccaccattagccaaaaggtatgtccatcggttgtagttgatatcaaacccgatgtcggtataaattccggtcaggaagttggcggtatacgtactatctgcaaaaacggtctcacgatttaaatccgaagtttgggtttgatcgaggaaactgtcattacaggacgcaactgttcctaaaaataggagtagcgttaatgatttcatgtacaatttcatagtaaaacttataaaattaaaattaaacaatttaaagccaataagccgagactaattcacgacttgaatttgtattaagacgattgacaagatatacaccactaaacacaatacttttttttcacgtattattattcagtgaaaaggtcattgtattattcgagcaatgatagtaaatcaaatacatctaaagaaagaattatccgagttagtggtttttcattcctgaatcgtctttatcctaaactctaatagtataacattatgagacgcatctttttgtcaacctttatagcttgtattatcggctttacaggtgcagaaacaaattaaataatcttaaatatcttattaaacatgaaaccaattcatcttatcctaagtatcgcactcctcgccggaggagcatgtggtgaccagcaagaaccttattacggcaattcagaagtgaagatgcctcaaattgattccgaatggaatctcgaactaatgccaaatcgatcaggacaatattggaaagtattcgtctacaaagacttgaaatacaatgcccttttcactcggtcgttgggctggaatggaggagacggtgtgttcaccactggtttgcctgacgggaatatattttggtcgttcaatgatagcttctatggcgtaatcaatgaaaatcgttcacgaggtaattgtagtttccctcgtaacagtattatggtacaaacacctggtgagaatgatgaaaatcttgtttggttagctgattacgtacaaaccaacgatcctaatgcggatagatactatcaggtacgtactcacattcgtcatccgaaagctacactatcggatgaaaaaatacaagctggagaaatcgatcaggattatctttattgggcaggagatgctacgatatataacaatcagatgcaaatgttgtggggagccgttgataataccgatccgaacaacttgatgcgccgctttggtacttgcttggctacttatagcttggaaggaaagccgggtgatgctacttatatgaaacttatcagtcgtaatgataattttaacgaccacactttaggttatggcgacactatgtgggaagacgaagacggacatatctatctttacacaacttccaattataaggtggctgtggcacgtaccgctacacgcgaccttggcagccagtgggaatattatgtggccgatccgcaaggacatttctcgtggacaacgcagtacccctcaatccaagatgctgaaaactctacaattatccctttggaaagtgcatgctctatgccttgggtatttaaaaaaggtgatacctattacatgatcggacaatccatgtggtttgggagagacgtgctgatgttccgtagtaagcacccttatgggccgtttgtcgaccaaaagactctttttacattacccgaatttcttgataagattggcgaacaacgttatcaacatgtttatatggtaaatattcatccggctttatcacgtaccggtgaattggtgatctctaccaatacagactgttccaacttttgggataatttcaatgcaccgggtagtgctgacttctatcgtccttatttctaccgtgtatttaattgggaatcattgtacgataacgatgctccacttgagtaaaaggatttactatctctggcgttgatcataagtttcattgggctgatgctgtgattgatggtaattccatcatcgtctcatctcctgaagttgctttcccaatagcagtgcgttatgcttgggcagataatccaatttgtaatttatacaatggagttaaccttccggcgtcccctttccgtacagatgactggcagggtattacttatggtaataaatagatatagttgtttcgatttgccaagtgaaatagatgtaacacataaaaaaataaccatgaacaagctcatttatttagtaatcttctctttcttatcaacaagtatatatgcccaaatgaaagaccttgtgcaatatgtcaatacactgcaaggtaccgactctcatttcggattaagttatggaaatacatatcctactacaggtatgccttatgctatgcatacgtggtctgcccagacagggaaaaatggagaaggctggaaatatcaatatgcagtagataatatcagaggattctgccagtctcaccaatgcagtccgtggatgagtgattatgcagtgtattcctttatgccgatggtggggaaattagttgtaaatcaggagatgcgggcaacgaagttcagccatgataatgaaatagccaagccgcattattataaagtgatgctggataatggaattacaaccgagatggctccaactactcgtggtgtacatttacgcttttcttatccctctaccgaagacgcctatctggtaattgacggatatacagatatgagtgaaatcaagattgatccggcaaagagacaaatctccggttgggtgaataaccaacgttttgtaaataactctaagacattccgtagttactttgtagtgcagttcgacaaagcatttgaggattacggtatgtgggaaaatcagaaagatgagatttatcctaaaaagttggaaggagaaggcaaaggctatggtgcttatatcaaatttaagaaaggatcgaaagtacaggcaaaggctgcctcttcctatatcagcgcagagcaggctgtgattacattgaacgacgaactgggtaaagataagaatttggaagccaccaaaatacgtggacataaaacgtggaatgaattattgaacagaatccaggtagaaggtggaacagacgaacaaatgaagactttctactcctgcctgttccgtgccaatctcttctcacgcaaattctatgaacgtaaagcgaatggagaaccttattattatagtccttatgacggcaaagtatatgatggatatatgtatacagataatggcttctgggacactttccgttctcaatttccattaactaatattcttcatcctaccatgcagggacgttacatgaatgccttgcttgccgcacaagaacaatgcggatggttaccttcctggtcagctcccggagaaacaggaggaatgttgggtaatcactccatttcattattggcagatgcgtgggcaaaagggattcggacttttgatccggagaaagccttaaaagcatacgcgcacgaagccatgaataaaggtccttggggaggtgccaacggacgtggtttctggaaagaatattttgaactgggatatgttccttatccggaatcaatgggatcgagtgcacagacaatggaatatgcatacgatgatttctgtggctaccaactggctaaaatgaccggaaacaaacactatcaggaagtctttgcccgtcagatgtataattataaaaacgtattcgatccgtctatcggttttatgcgtggaaaaggcgttgatggtaaatggcaggaaccgtttgacccattggagtggggtggacctttctgcgaaggtaatgcctggcattatacctggtccgtattccatgatgtagaaggattaataaacttgttcggaagcgaccaaagatttacgaccaaaatggattcggtattcacccttcccagcactattaaaccgggaacttacggaggagtgatccatgaaatgaaagaaatggaattggcgggtatgggacaatatgcacacggcaatcagccgattcagcacatgccttatctgtatagctatgccggccaaccgtggaaaacccagtattgggtgcgtcagatcgttgaaagattgtataattccacagaaagaggatatccgggagacgaagaccaaggtggtatgtcatcatggtatatcttgagctcattaggcatttatgccgtttgtccgggtacggatgagtatgtaattggtagcccgttatttaagaaagctactataacgatggaaaacggcaataaattcgtgattgaagcgaacaacaatagtaaagagaatctctatatccagtctgctaccttaaatggacgtgtgttggataagaattttatcagatacgacgatatagcagacggaggaattatccgttttgaaatgggaagtcaaccgaataaagaacgatgtacgtcgaagtatgctgctcctttctcattgtcgaaagaataagaaactaaaaagatataagaagaatacagtatgaaaaataaaattttaacaggtttattattggttttgattggagggtgggggagtctctcggcgcagagcgctgggagtaattatgcccgtcaggtaaataccctaataggaacgaagggcgtgggtttgacttcgggatatctttatcccggagccacctatccttatggaatggtgcagttcaccccctcttatttttccaaacgttccggattcgtcatcaatcagttgagtggtggcggttgcgaacacatgggcaactttcccacttttccggtaaaaggtaaactgaagatgtctccggacaatattctcaactaccgcatcaatatttctgaagaaaaaggacacgccggttattatgaagcaaaggtgcaggaagatattcatgcaaaactgacagtaactgaaaggaccggtatggcgagttatgaatatccggcagatcagcaatatggtacggtaattatcggtggaggcatttccgcaactccgatagagcaggccgccatcgttattactgcaccgaataagtgtgaaggatatgcagaaggcggtaatttctgtggactccgtacaccgtataaagtctattttgtagcagagtttgatacggatgcgttggaatcgggaacatggaaaagagatgaactgaagccgaacacgacttttgctgaaggagaatactccggagtctattttacttttgatgtaaataagaagaaaaatatccaatataagattggggtttcttatgtatcagtagaaaatgcacgcgagaatctgaaagcggagaataccggatgggatttcctgcagattcagaatcaggcagaatccaaatggaatcattatttgggtaagattgaagtagaaggaaccaatccggatcgtaccactcaattttatactcatctgtatcgttcattcattcacccgaatgtatgcagcgatgtgaacggagaatacatgggagctgacttcagagtgcataaatcccgttccaagcactatacttcttttagcaactgggatacctatcgtacacagattcaactattgtcaatccttgatcctgaagtagcctctgatattgttatttctcaccaattgtttgccgaagaagctggtggtgctttcccgcgttgggtgatggctaatatagagaccggcgtgatgcaaggagatccgactcctatcctaatatccaatgcttacgcttttggtgcccgcaattatgacccgaaaccgattttcaaaaccatgagaaaaggagcggaagaaccgggagcaatgtcacaggaggttgaggctcgtccgggactgaaacagtatttggataaaggatattacaacgcttctatacaactagaatatacttccgctgattttgcaatcgcacaatttgctttacatgccgtaggagatgagtttgcaagttggcgttatttccattttgcacgttcatggaagaatctgtataacccggaaaccggatggttgcaatcacgtaatccggatggttcgtggaaaccactgactgaagatttccgtgaatcgacctataagaattatttctggatggtgccatacgatattgccgggctgatagaaatcatcggaggcaaagcagcggcagaaaaacgcctggatgaattctttactcgtctggatgccggctataatgatgcctggttcgcttccggcaatgaaccgagctttcacattccctggatatacaactgggtaggaactccctataaagcacaggagattattaaccgtgtattgaatgaacagtattcaagtaaaattgatggtctgccgggcaatgatgatttagggacgatgggtgcctggtatgtgttcgcttgtatcggtctttatcccgaaataccgggagtgggaggctttacggtgaacactccgatattctcatccgtgaaagttcatttgaagaaaggggatatggtgataaaaggcggttcggaaaagaatatttatatcaagtccatgaaactgaacggtaaaccgtatgacagtacatggatcgattgggatcaactgaataatggggctacaatagaatacactacttcggctaagcctgacatgaagtggggaactaaagtgacgcctccctctttcccttaaagcaaatcaacgaggtatataaatttatgatataagataattttgtaagagcacttatttataacatcaaacgtgaaaatgaaaagaaaactacaaaacatagcttatctactgatggctgccgcattaatcacttcctgtggcgagaagaagcaaacagcagaattcccggattgggcgtgggcagatttccagcgtccggaaggaattaatccgattatttctcctgacactactacctttttctattgtccgatgcgacaggattcagtagcatgggaagcgagtgatacgtttaatcccgctgctactgtttatgatgggaaagtagtagtcctctaccgggctgaagacaattcggcaaccggtatcggatcacgcacctcccgtttgggatatgcctcttctgacgacggactacacttcaaacgaatgtccgtacctgtattttatccggcagacgacagtcagaaagagttggaaaatcccggcggttgcgaagacccacgtgttgctgtaacagaagacgggctttacgtaatgcattacacacaatggaaccgcaaacaggcgcgtttggcagtggccacctcgcgcgatcttcaaacgtgggaaaaacatggaccggctttcgcaaaagcatacaacggaagattcatagatgaattttccaaatctgcctctatcgtaacccaattaatcgacggcaaacaagtgattgccaagattgacggcaaatactggatgtactggggagaaaagtttgtgaatgtagccacttccacagaccttgtcaactgggaaccgatgttggatgaaaatggagaattcctgaaggtgatgactccccgcgcaggtaagttcgacagtgacctgaccgaatgtggtcctcctgccatcctgactgacaaaggaatactgctgctttataacggcaaaaataaatcgggcgcagaaggagacacactgtatacagccaactcttattgcgccggacaagccttatttgatgccaaaaatcctactaaactaatcgatcgcttggataaacctttctatattcccgaatcagactttgaaaagagcggacaatatccagtcggaaccgtatttatagaagggcttgtattccacaatcagaaatggttcttatattatggctgtgccgattcacgcgtggcagttgccgtatatgatcctctcaaaaaataaagaaaacgttcataatgaaaataacagtttataaaatagaaattaagacatgaaaaaactttttgtattgattgcagcggcttgtatgacatgtactgctgcgtttgcacaaactgtgaaaccttttaaggagggtgagagagcagtgttcctgggaaatagtataacggatggtgggcattaccattcatacatctggttatattatatgactcgttttccggatatgcctatccgtgttttcaacggtggtattggtggagatacggcctatgatatgaacaaacgtctggatggtgatatttttgcgatgaaaccttccgtgttgatggttacttttggtatgaatgattccggatattttgaatacaacggtgataagcccaaagaattcggtgagcagaaatatcaggaaagtataaagaattaccagcagatggagaaacgttttaaagatcttcctgatacccgtatcgtgatggtcggaacttctccgtatgatgaaaccgtacaactcaaagagaatacaccgttcaagacaaagaatgaaaccatcaaacggcttgttgaatatcagaaagaatcggcagctaagaataattgggaatttaccgatttaaatgctcctatgacagctattaatcagcaatatcagcagaaagatcctacctttaccctttgtggcagtgaccgtattcatcccgataacgacggacacatggtaatggcctatcttttcctgaaagcccagggatttgtaggtaaggaggtagcggatatggagattaatgctaataagaaacaagccgttaagtcggaaaattgtaccgtttcaaatataaagaagaatggaaaagatttgagttttgactatttggcagaagctcttccttatcctttagatactattgctcgtggttggggacagaaaaagagccaggcagaagtgctgaaagttgttccttttatggaagagatgaaccgtgaaacgttgaaagtaacaggactgaaaggcaattataagttgttgatagacgatgaagaaattggaacctggagtggagatgaactggcaaagggcattaatcttgctgctgaatccaaaactccccaataccaacaagcattgacggtgatgcacctgaatgaatatcgttgggaaattgaaagaacattcagagaatatgcgtggtgtgaattcggctttttccagcaaaagggattgctgtatgctgacgacagaaaagcgatcgaggtgatggatgaaaacttggataaaaacgtttggttgaagggacgtcgtgatatgtattcaaagatgatgtttgaagctgtccgtgatgctcgccaacaggaaatggatgttcttatcaataagatttatgaaataaataagcctgttgtaagaaagattttacttagaaagatatgatgtgataacaacgtacaaatacgatagaatactcaccgtaatgagaaagaattctcactgtaatgagaactttttctcattgcgatgagtattttttctcattacggtgagaatcgttgagaatatatgaatagataagtactctttgtaatagcctgataatgtactccttattgtagcttttgcattaaagagactacctttattgaattcttaattctttttccagaaatcggaagtgaaaagtagtaatactgtaaacaattccaaacgtcccaagagcattaaaaaagaaagcagccatttggcggcatcaggcaattcactccatgagaaggccgggccgcatgtgccaagtcccggtcccatattacccatacttgagattacggttccgattgattccagaaaaccgactcccagccccatcatgataagtatgctgatgatagcgatgactgcatataaaaaagtaaaggccaatactgtagactggatggaaggagaaataacctgtttgttaactcgcaccgggagcacggcattagggtgaagaatatgtttgaattcgtttttcacaacctgaaacaggataaccatacgaatacattttatacctcctgttgtactgccggcacaggctccgattatcatcactattagaaggcatccccaaaggatagaaggccaaagcatataatcggctgtggcaaatcccgtagaagtttgcaaggaaatcacttggaaaagtgatttacggaacgcttcttctatctccatagaagaagtctgatgaagccagactgcaataaatatagtaaagaaagaaacacaccagaaatagaattttagctctgcatcatgaatgaacttctttatttttccattgaacatcaacagtaatagcgtgaagttgatgcccgaaagaaacatgaaaatagagattacataatctatatagggtgagtgataatattcgatacttgcttgtttggtagaaaatccgccagtgctggttgtcgtgaaagcatggcatatactgtcaaacacactcatacctccaaatactaataagacaatcaatgtccctgtcattccggcataaataccccaaatccatttggcagtgataccaatacggggatgcactttgtcatgagtaggaccgctggcttctgctgcaaacacctgaatcccgcccacaccgaaaatcggcagaacggcaatggtgaagaatacaatacccaaaccgcctatccattgtgtcatagcccgccaaaaaagtattccatgaggcattgactctatattattcaagatggtggcacccgtactgctgaacccggacatcgtttcaaaaaatgcatccgtaacacttgggatataccctcctatataataaggtaacattccgaaaagggaaaaggtgacccatgctacactgactatgacatatccatcacggcgattcagggatttcactgcgtctttcccgatggcgagcaacagaataccgatgctagtggtaatagccgatgaaaccagaaaactctgcaagtcattctccttataaaaaagagaaacacctccacaacataatagcataactgtttctatcagaagcagaaaacccagaatccggaatatcatcttcgagttaatcataaacaagtatttgttaaatattaagtatctagtattaagtattacccataactgtccatttttaccgactaatacttaatacttgatacttaatacttagttaaagaacttctcaatctttttaatcatcatgcttaggcagaatacgactacatggtcgccggggcggatttgcgtatcacctgtcaccaggataccttctccgttacggatcattcctccgatggtggtgcctttggggagccccaggtctttaattaggtgtttggttattttggccccttccggtacggtgaattctgcaacgtccgcattggcaaaagtcaggcatttcacattagacacgtcggcgtccagcatcatttggtagatatggctggcagcaatcatttttttattgataaccgtgccgatgtcgagactctctgccataccgatatagtcgatgttctccacttctgccaccgtcttttccactcccatgcgtttggcggcgagacaggcaaggatattcgtttccgagttgccggtcaaggctacaaatgcttcggtattcttaagcccttcctcgataagcagatccatgtcgcgaccgtctccgttgataatcattgttttgtcatccagtagctctgtcagacggttgcaacggttcaggtcattatccactattttcacctgcatatagtccggcacatattgtgcggtacggactgcgatacggctacctcccataatcattacattgcgtacatcggcatagtcttctttgccggctattttacgtatataaggaatgtatttgcgggtagtggtgaaataaacaatatcatgcaatttaataacatcgtctccgcgagggataatcgtttccgttccgcgtttgatggccactacgtggtaaggaatgttgggaccgcctaattggtgcagcggtatattcaggatttcagccttttcgcgcatcttcgtaccaatcagaaccagcgaacctccacagaattcccaccattggcgtacccagctcatgcgcatggaagatacgatttctttagcagccagcatttccgggtaaatcagagaatctactcccagcttctggaaaaactctttatttttgggtagaagatattcatagttgtcgatacgcgccactgtctttttggctcccaggttggtagccagcatacaggcagtcatgttgcggctttcgtccggtgtgactgcgatgaacaggtcggcttctttgacgcccacttctttcaatccggagatggaagaaggagaagcggcaacagtcagcaagtcaaagttggcgctaagagcacttagtttctcttcgtcatcatccatcaagataatatcttgcttttcgcgcgataacagtttggccaaatgggtgcctacgttgccggcaccggcaataataatcttcatgtcaattgataaattcttttattttagtcagaatcccttcttcatccatgccgcacagttggtacagttcggcaactgccccatgttctacaaatatattagggataccgatacgcttcacggtcggtttgtattcgttgtctgccataaattcgaggacagcgctacccataccgcctttgataattccgtcttcgatggtcaggatacgttggaatttacgtcctgcctcatgcaacaactcttcatccagtggtttcagaaatcgtaaatcgtaatgggcgatggacagacctaaatctgcttctgcccgggtgatggcacgggcggctacatttcctatcggtccgatagtaatcactgcaaggtcgctaccctctttcagtttccgtccttttcctaccgggatctcttccagcggacacttccagtccaccagtacgccgcgtccacgggggtagcggatcacgaacggtcccttgtccggcaattgtgccgtatacatcaggcgacgtaattcgtgttcgtccatgggggaactgatagtcagattagggatcgggcgtaaacatgccatatcaaaagctccgtgatgagtaggaccgtcttcgccaaccagtccggcgcggtcgagacacaaaacaacaggaagattctgaatcgctacgtcgtggatgatattatcatgcgcccgttgcataaaagaagaatagatattgcagaacggttgcagtccgtctttagccatccctccggagaaggtaaccgcatgtccttcggcaataccgacatcgaaagcgcgtttcggcattttctccattagtatattcatcgaacagccgctgggcatggcgggagtgacaccgacaatcttcgggttggcttcggcaagttccaccagtgtatttccgaatacgtcctggaaaagcgggggcattccttcggtgttggcaatgaaacgttcgccagtgacgggatcgaacttgccgggagcatgccattcggtagcgtgtttctctgccggaccgaatccttttcctttgatagtgtgcaggtgcaggattttaggtccttgcatatctttgatatcacgtaatactcttgccaggttctttacgtcgtgtccgtctatcggaccgaagtaacggatattcatcccttcaaaaatattctgttgctgggccgccattgatttcaggctatttccgaaacggatgagcgctttgcggcgttcttcgtttaaaatgccaagcttgaacagcatgcgcgagagcttgaaacgtagctgattatagcggttggaagtcgttaagttgaaaagatactgcttcatgcctcctacgctgcggtcgattgccatatcattgtcattcaggataatgagcaggttgttcgacgtggcagatgcgttgttcagtccttcaaaagccagtccgccactcattgatccgtcgccgataatggctactacatggcgtttggcgtctcctttccgggcggctgcgacagccataccaagagcggcagaaatagaattggaagcgtgtccgcacgtgaaagtatcatattcgctttcttccggagacgggaaagggcggattccaccgagtttcctgtttgtggaaaatgcttcacggcgtcctgtaagaattttgtggccgtatgcctgatgccccacgtcccatacaatacggtcgtatggtgtattgtagacgtagtgcagagctacggttagttccacggttcccaggctggcggcgaagtgtccggggttgcagcagagttctttaataatgtcttgccttagttcaccgcatacttccggcagttgctctacggttagtttacgtaggtcttcggggtaattgatggagtttaacaagttatatgttggttcactattcatgattctaggaaatttagtgcaaaaatacgaaaagaaagtatattcgacctccttttcggcgaaaaacttattttgtttcctactgtctaatcagtctgtagtaccaataataaatgaataaatgagagtaggttaactatccagttaatctaaatggttactttttatcaatgaactaatcattttacatgtatgtcttcttgttttattcctttaaataatggttggcattcattggctatttcatccaataattgattagaaatattcattgatagctgatttgtatgaatgaaatattgttccagttccagtcggtatctatgatactaaataaatcaactccttgtatggatagtattccgttttggttatctgcttttaggctaacttgtatgttattcatattatggataattatattttgcagtttgttggtttgattatcagataaagacaaagataagaaagttcttttgcttctccaattatttgtcatatctttattgtacttttgcttcgagaaaaagtttaaaaaacaatatattcaatagatgtctattaatgaacttataaaccagtctgaaggtcggcgtttagaatttaaaggtgagcttcctacaaattctgatttagcaaaaactgtagtggcttttgccaatgatgcgggaggtgaaatttatataggtatcaatgataacccgcgacagataatagggttgtccgaagaagaattacctcgtattgaagagcaaattagtaatttaatatatgatagatgttatccgattatattacctgaagtctcttttttaactatagaggacaaacaccttattaaagtgtgtatttatcgtggaagtatgcccccttactatcttaaagataaagggaagctgaaaggaacttatattagggttggttcaaccaataaactagctgatgaaacaattattgcagagttagagcggagacggagaaatatttcttttgatagtgaggttgtcatggataagtccgcagatgaattggatataagtgggtttaaattactctacaaagagaaaacaggtgaagatttaaatattcaagtgcttcgtaaactggaattggttaagactgaacaggataaagaatatcctacaaaagctttacttctattttcggatgataatttgcgtaattctatgtttccgaatgccaaagttgaatgtgcccgtttcaaagggacaggaacggaagagtttttagatcaaaaaagtattattgtccacattgggttacaggcggaagaaacttataactttgtacttcggcatattaataaagcagcaaatatagagggagtatatacggtttcacgttgggagtatccagtgaaggcaataagggagattatccgtaatgcgattgtacatagagattattctctgacaggaaaagatgtcaaagttgccatatatgatgatatggttgagatcacaagtcctgggcttttaccaccctctattgattattcggcaatggagagccgccaatcagatgcaagaaataaagtaatagctcctgtgtttaaaagacttggcatcattgaccaatggggtaatggattgaaaatggtggctgaagaaatgaaatcttatcctgaaattgatttatgttggaaggaggttggtttgtcttttcaagtacagtttattaaaaagaactatcaggagaatataaatatggaagatagtgccgataatgaacgaagaccggctcaatatactacccaacatactacccaatctactacccaatacactacccagaaattaacagaagcccaaaatatgattttaagttatctaagagaacatccggaggccacacgggcggatttaaatagtcatattgaaggtataacagtcgatggtataaaatataacttggcacgtttacaggagttgggcttattaaaacgcgtaggaagcaaacgatatgggtattgggtagtgcttggagaatagtttgaaatttttaaagagaaaataatatggatttccgtacacaaatagagttacctgttggtttaccgcctattactcatgccggacaaatactcatgatgggatcttgctttgtccaaaatgtagggaattttttgaaagatgccaaatttcaattagatttgaatccttttggtattctttacaacccttcttctctttctgctgttctgattgaaatcttaaaaagaaaagtatataagaagggtgacttgtttttccataatgacctttggcatagtcctatgcatcatggtcttttttctggacctaccttggaaagtacattgcagaatatcaatattcggctgttacaagttcatcaggctatgcaaaaacttgactggctgatgttgacttttggaactgcttatgtttatgagcagaaagaaacgggaaaggtagtgtctaactgtcataaactgcctgagaataaatttaatcgtaggcttctgtctgttgaagaaattgtagaagattatacagcactcatcaccgaaatggccgcccggaatccggaactaaaatggctgtttacagtcagcccgatccgtcatatacgcgacgggatgcacgccaaccagttaagcaaatcgactctgctactcgccatcgaccgattgcaacaactgttcccggaacgagtgttctatttcccctcttatgaaatcatattggacgaattacgtgattatcgcttctatgccgacgatatgttgcatccgtctcctctggcgattcgttacctgtgggaacgcttctccgaaaccttcttttctcctgaaacaaagcaggttatcgtagctgtgcaagacatccgccgggacttggcgcacaaaccctttcatcccgagtcagaagcgtatcaacgctttttaggacaaatagtgttaaaaatagaacgacttattggaaaatacccgtacttagattttcaaaaagaaacagaactatgtcatatgcgattgaatccatagccaaaagtatcggtgcccgccgtgtgggcaaacataaagcgactattgattggctgctaacagacagccgctctttgagttttccggaagaaactcttttttttgctttaactaccaaacgaaacagcggagcccgttatatccccgatttatatgaccggggcgtacgtaattttgtaattacggaagaagactttaaagaagttgagaatggagagttgagagttgagagttctatgcagcatgatggtgcgcagcccactctcaattctcaactctcaactctcaacttcctcatcgttcccaatcctctgaaagctttgcagaagcttgccgaaacacatcgtgataaatttaagatccctgtgatcggtatcaccggcagtaatggaaaaaccattgtgaaggagtggttgcaccagttgcttagcccggatcgttgcatcgttcgttctccacgcagttataattcgcagatcggagtcccactttctgtgtggcaactttctgaagaagccgaactgggtattttcgaagccggcatttccgagatgggggagatgggagctttgaaacgaatgattaagcctactattggtattctgaccaatatcggtggtgcccatcaggaaaacttcttctccttgcaggagaaatgcatggaaaagctgacgcttttcaaagactgtgatgtcgtgatttacaatggtgataacgagttaatcagtaattgtgtcgcaaaatcaatgctgacggcacgtgagattgcttggagccgtaccgacattgaacgcccgttgtatatcagccgtgtgaccaaaaaagaagatcataccgttatatcttatcgttatctggagatggataatactttctgtatccctttcatcgatgacgcttccattgaaaatgcactgaattgtctggcagcttgtctttacctgatgacacctgccgaccagataaccgagcggatggcccgtctcgaaccgattgccatgcgtctggaggtgaaagaggggaagaataactgtgtactgattaatgatagctacaattcagacctggcatcattggatattgctctcgatttccttgtacgccgctcggaaaagaaaggcttgaaacggacgcttatcctgtcggatatactggaaaccggacaaagtaccgctacgctttatcggcgtgtagcacaattggtacagagcaaagggattaataaactgattggtgtagggcaggagatatcttcttgttccgctcgttttgatgatgatctcgaacgctacttcttccctaatacagaagcactccttgcatccaatatacttaaatcgcttcattcggaagtgattctggtgaaaggttcccgcgtgttcaactttgatttggtatccgaagccctcgaattgaaggtgcatgaaaccattcttgaagtaaatctcggggcgatggtagccaacttgaaccattaccgttctatgcttcgccatccggaaacaaagatgatctgtatggtgaaagcatcagcttacggagccggttcgtatgaaattgccaagagtttacaggaacaccatgttgattatctggctgtagccgttgctgacgaaggttccgaactccgcaaggcaggcattaccgcctctattatcattatggacccggaacttactgcattcaaaaccatgtttgattataaactggaaccggaagtctataatttccatctgctcgacgcactcatcaaagctgcggagaaagaaggaatcaccaacttccccattcatgtgaaacttgatacaggtatgcaccgtttgggctttgcggtagaggatattccattgcttatccgtcgtctgaagaatcagagcgcggtgattccccgttcggtattctctcattttgtaggaagtgattcgtcacagttcgacgctttcacccgcggacagattgaattgttcgagaaaggttcgcaagaattgcaggccgccttctctcataagattctccgtcatatctgtaatacggcaggaatcgagcgtttccccgaagcacagtacgatatggtgcgcttgggaatcggactttatggagtcagcccgatagacaattcgataatacataatgtaagtacgctcaagaccaccatccttcagatccgggatgttcctcaagaagatacggtaggatatagccggatggggcatttggtacgcccttcacgcattgcagctattcctatcggttatgcggatggactgaaccgccacttgggacgcggcaacgcctattgcctggtgaacggaaagaaagctccttatgtggggaatatctgtatggacgtctgcatgattgatgtgacggatattgattgtcgggaaggcgatcaggctattatcttcggtgatgatctgccgattacggtgttgtccgataagctggaaacgattccttatgaagtgttgacaagtatatcgacacgggtgaaacgggtatattatcaggattaattcaccacagattacacggattcacacagattgaagagaatatatagtagcaataaatcgaaagataagctataaatctgtgtgaatccgtgtaatctgtggtgaaaatgattatatttgcagcaactattaaaaacctcttatatcaaataaacttatgacaaacttattattgttaggctttttgcccagtggttccgaatggattattatcgctttggttatccttcttctttttggtggaaagaaaattcctgaactgatgcgcggattaggcaaaggcgtaaagagcttcaaagacggtgtaaacgaagcgaaagatgaaataaacaaggctaaagacgagttggacaaaccagtagatccttctaagaactaaaagagcacaacatacggatggcagaaatgaccttttgggatcatttggacgaattgcgtaaggtactttttcgggtagttggagtttggtttgtattggcaataggctattttattgctatgccctacctcttcgaccatgtgatacttgcgccttgccacaatgatttcatattctacgatttattacggcatatcggtaaaacatttgatttgaccgatgacttcttcacgcaacaattttatgtgaagctggtcaatatcaacttggctgctcctttctttattcacatgtcgacagcattttggatgtcggtggtgacggctatgccttatatcttttttgaaatatggcgtttcatcaatcccgccctttatccgaatgagagaaagggcgtgcgtaaagcattgactatcggaacactgatgttcttcatcggtgtactgttgggctactttatggtttatccgttgactctccgtttcctttctacttatcagttgagttcggaagtggagaatatcctgtcgctcaattcttatatcgacaattttatgatgctgattctctgcatgggattggcttttgaacttccattggttacatggttgctttctttaatgggagtggtcaacaagtccttcctgcggaaataccgccgtcatgcggttgtcgtcatagtgatagctgctgctattattactccgacgggagacccgttcaccttgagtgttgttgctattccgctttatctgttgtacgagatgagtattttgatgataaaggacaagaagaaaacagaagaggaagttgaagatgaagctggagatgaagttgccctgtccgaagagtgaagcgatagaatcttatgaaatccttttagcagtttgccggacggaagatgcttatcttgccgtaggatataagcaaatgcgcgacttgctggagcgtatttgtcgcgcgcaaatgcaaaacgaaagcttacagatgaccgacctttccgcacgaatcagttttgtggcggctaaggtcggtctctctgttgcagagcagaaccggctgcatactttccggctcacttcgaatgctatcttgaaccgccagcaggagcccaaccgggaacaactcttgcgcgatgcgaaaacattagctttctttattcgtaaactcttggaagaagatattcccttggaactataccggctacttccgcgtgcggatgccacctacctggttgcgcctcctgcccgcgaacgagtgcagcggatacgtgtctgcttccagtatgccgacgagcaatatttgtatgtgactcccttggacgaagtctcggagaaaccatatttagttcgttataatattcctcaaatcaatgaagagtttgcagaaacgtgcaaactgctttggcgtcatgcccaggtcaatttattggatgttgcagtggatgaggcgggaatcctgactccttctttcattgtactcgaaccggattatttacttgacatcagttctttggcagagtgtttccgtgattacgggcatcatccagccaattattttctttcccgccttcaaccgattgaaaatgcccggcctctgttactgggaaatatagccaatcttttcctggacgaatggattcatgcgaagagtgaagacatagattatcgtacctgtatgcagaaagccttccggcgttatcctattgagttggctgcctgttccgatttgcgcgacaaagagaaagaacgccaattctttgaggactgcaaactgcacttcgatcatattcgtgaaacggtcaatgatacctttcatgcagccggttatgaactggacaagacagatgccgtgctcgaaccgtcttatatctgtgaagcactcggacttcagggacgtctcgactatatgcagcgggacatgtcttctttcatagaaatgaaatccggcaaggcggatgaatacgctatccggggcaaggtagagccgaaggagaataataaagtacagatgttactttatcaagcagtcttgcaatattcaatgggaatggatcaccggaaagtgaaaacctatttgctttatacccgttatccgcttctttatccctcccgtccttcatgggcgatggtacgtcgggtgattgatttgcgtaaccgcattgtggccgatgaatatggcgtccaattgcgaaacagtctggaatatacggcacaaaaactggaagaaatcaatgcctccaccttgaatgaacgaggattgaaaggacgtttttgggaaacatacctgcgtccctctattgataactttcaatcgaaactgaaagctctttctccactggaaaagaattacttctatgcggtgtataactttattacaaaggaactttatacctcaaaatccggtgatgtggattatgaaggacgtaccggggcagcttctttatggctttctacattagcggagaaatgcgaggccggagaaatcatttatgatttgaaaataaaggagaatcatgcggccgatgaacataaagccggacttactttttctttctttaaaaaggaaaaggctgggaaaactttgttgaatgaagctgccgtaaatgacattaccggagataaagctattggaaatgatattcttggaaatgaagcctctgcaagtaagactgtcagaagtgaagctcttgaaacagggacttctcttcctaatttccgtcaaggcgatgccattatcctttatgaacgtaaccgcgatacagataacgttaccaataaaatggttttcaagggtaatattgaatacctgacagaaaacgaaataggtattcgcttacgtgctacccagcagaatccatccgtacttcctgccgaaagcctttatgcgatagaacatgatacaatggatacaacattccgctcgatgtatcaggggttatatatttatctttctgcaaggaaggagcggcgtgacttattgttgtcacagcgtcctcctcgttttgatgaatcattggattccatgatttcccgttcggaagacgattttacgcgaatcgccctgaaagcaaaagccgcacaggattatttccttcttatcgggcctccgggaacaggcaaaacttcatgtgccctgaagaaaatggtggagacttttcatgcagataaagatgcgcagattcttttgctttcatacaccaaccgggctgtcgatgagatatgcaagtcgctggcttccattgctccggctgttgattttatacgtgtaggaagcgaattgtcatgtgatgaagcctaccgcgggcatctgattgaaaatgaattatcctcttgtaaccgtcgttcggaagtgtacgaacgcatccggaattgtcggattattgtgggaacggtagcggctatttccggcaaaccggaactgttttgtttgaagcattttgatgtagccattattgatgaagctacccaaatattggaaccgcagttgttaggcatcctctgtgcacgtggagaagacggaaaagatgcaatagataagtttgtgttgatcggagatcataagcaactgcctgctgtcgtacagcaaaatacggagcaatcggccatttatgatgaatctttactgtctatcgggttgaccaatctgaaagattccttgtttgaacgcctctaccggaactgtactgcaacggttcaacgttcctacgatatgctgtgccgccaagggcgaatgcatccggaagttgctttgtttgctaatcgtgccttttatggagggcgtctgatccctgtcggcctgcctcaccaaatagaatcatccgatactatctgtcgtttggctttttatccctctgtgccggagaaggccggagcatctgcaaagatcaactattcggaagcacgtattgttgccgacttagctgttcgcatttatgaagatcatcaggcagattttgacgaatcccgtactttaggaatcattaccccttaccggagtcagatagcattgataaaaaaagaaatagaatcattaggtattccagctctgaaccgaattctagttgacacagtagaacggttccagggaagcgagcgtgatgtaataatctattccttctgtgtcaactacccttaccaactaaaatttctatccaatctgacggaagaagagggtgttttgatcgaccggaaactgaatgttgccttgacccgtgcaagaaaacagatgttcattacaggagttcccgaactactcgaacgcaatccactctataaaagtttattaaaattaatagaaagcttctgaaaaattgcatcattttgcagatgttagtttttattctctctttatgcaattcattaacacctctatgttgaacaaacgcctatatttgcaacacgtttttttcatagagatttagatttaaggttagaagaattgtggaagtcgtgagacttccctttttttcatcttaacgtttactatacttcattataggaatgcaaaaacactgtttttagtgtttcggttaaaaattttgcaggaggatgatgcaggataagtaaacctaaaaagccttcttcgtgagaagaggcttttttattttttcatttttcatttttttgaataattggttaaaacaaaagagtaactcggcgacgagttactcttttgtttttaacgattctatctgtttgaatagatctactctaatacgataggtttgtatttcggaactaatgccttcatgataacccaacccaacagataagctactgcacatacgcagaagataacgaaatatccggctggtttgccttcgaatcccatgaatgtcatggctgggtgtacgaattgtgctccttgttcgagtaactctttcgtcatttccacctcatgaccgtcaactatcgttgttccggaagcatatacgaacaagttacctgccactttctgaagaatcatagagcctacgcctcctgccataccacctataccggtgatacttgcaatagctgttcttgggaacatatcgcctacggtagagaatatattggccgaccaggattgatgagcagctccaccaataccgattaagataaccgggaaccatggagaaacagtacctaacggttgtgctaacagtacaaccagcgggaagaaggcgaagattagcatcgctttcatacgggctgcatacggattcatacctgttctgttgatgaagatagtaggtaatttaccaccatagatagataacatagtcactgcataaagcgtaaagatcaacgccatacccagcgggtcggaggttttgataccgaattgtgtattcagataagacggagtccagaaaaggaagaaccaccatacgccgtcagtcatgaacttaccgaagacaaaggcccatgtttgtttgtagctgaaacattgccagaacttcattctcttttcatctttctcgtctgtcattggagcactgcctgcttcgcggtggtcttgctcgatgtagtcaagctctgcctgattgacatgtttgcttttcgacggggcatcgtacataaatatccagaagcccatccaaataaagccaagtccaccaattacgataaatgccatttcccaaccgaacattttcgccaggataggaatggtaagaggagcgatcaatgctccgatagatgcaccggcattaaagatagaagtagcataagcacggtcttttttagggaagtactctgcggttactttaatagcggcagggaagttaccggcttctcctaaagcgaggatacagcgggcggcgaggaagcagtacatactgaccgtagcaatagtcactaccacatctcctgtggcacctgccagttctgctgcgctatgaagcccaacttgtgcttctgtaacaataccacaaacggcatgaagacaagcacctgccgaccagacaccgatagcccataaaaatccttttttagttcccatccagtcgacaaaacgaccggcaaacagcatacatatagcgtatacaatggagaaaacagaagtaatagtaccgtagtgagattcgtcccagtggaattccggtttgataaattcatcccacgtcaatgagagaacctgacggtcgagatagttaactgtagtagcaaaaaatagcatagcacagatggtccatctgtagtttgtcatcttttcgcctgttttttgaaatgcattcatgataatggatttaaatagattttgtttcgttgacaaaggtcggtatttcgactgaattttatttgtaaaaattggtcaaaatcatgtattattcgttgcattatatatgctatttgtttcaaaggatataaaaatgtctcatagcattatcatttgcaacgttgggggtaatacagaaagaagataaacgagtttgtgaatcaagagcaaatgagtctaatcttttagacgcagatgacgcggataatgcggatacttattttttgatccgtgctatccgcgttatctgcgtctgaaaaattatatgtaatacaggaatacgcaacggttagcgcatttctgtatatttgatcttgtccatgtctccgtaatcgaggttttcacctgccataccccagataaacatgtagttgcttgttccggcagcagcgtggatagaccattccggtgacatgatagcttgttcgttctgcatccatacgacgcgttcttcttgaggttcgcccatgaagtggcagatagcatttccttccggtacattgaagtagaagtatgcttctacacgacgagagtgagtgtgtgccggcatggtgttccatacgctacccggtttcagttcagtcaatcccatctgcaattggcaaggaccttcctcaagtacgttgttaacaatcaactggttgataacgcggtcgttgctttcttccagctttccggcagcaaatgagtttgctttcagagaacctttacgtccgtcgatagtaatcaattgagtcttgtattccttgtgggcagtagccgagttgatgtagaatttggcaggattgctggaatctttgctcttgaaagttactttctgcttgcctctacctacgtacagagcatctttgaatttcagcgtatattctttaccgtctacggttacgataccttcgccaccaatgttgatgacacccagttcgcggcgttcgaggaagaatttagatttcaacgggtcgattgtttcaagtaccaattcttttgttgcaggcactgcgccaccgaagatcagacggtcgtacatagaataagtaacgttgatttcgtttggaaccattactttttccatcaggaagctactgcgcaagcggttagtatcatacgttttcacgtcttgcgggctgcaagccacttgcatcttgtaattcacctgggcggaggcagacattgctgcgatacccaacatcattgcaattgctaattttttcatctttcgagttttttattgagttatatattatataccacttattataatcagttaaaggcttttctacttattccttattactgttcaatgcgttctttgcatcgtttctagtcatgcggatacgattgtagatagccattccgagtgccagtgccacgaggatggcagggccgataatcttcagactgtaagtaaggtggaagataccccagcagaagagactggaagcaaagtcaagtgctccaccttcaaaaccggcggggatgtttactgtcgggtcacctgttgcttcgtatacatctttagcagccagtgtgaagaagcctgccagtcctgttacgaaatacagacctacaatcaatgctaccaggccgataataaatgatttcactacgttaccttttgtaataggcagaatcatcgggaacaggtagaacatacctgccagagaagccagcggtaagaaacggttgcccggaaggataacagccaggaagatagtgacagggatcaacagcagagataccaccagggtagtcgggtgaccgataaccagtgcagggctcataccgatactcaaaccggtgttattcttatatttcttagcgatcagttcgcgggtagcgtcagagatcggtttcaaaccttcgataaagaggctggtgatacgtggaatcaattccatcaccgcacccatcttgatacccagtcctaaaatgcccggaatattatccaatacttctttccagctggcacaacccaatgcaccgataccgcaaccgattacgatacccaagaacagcggttcacccatcaatccgaatttctttttcataccttcagaatcgatattcagcttgtcgaatcccggaattttatccaatagtttattgattacaatagcaaacggaacgaaactttggcagaacggttgaggaatagagataccgtccattttatcatagaacttttgaaaagcaggagcagtcatatcagccattaccagtgtaatgatgtagcagatgatggcagcgaagaatccccaatagatattgtcggaagcgaagtagacgatagcaccgataaatgcgaagtgccaatagttccaaaggtcgatattaacggtacgggttgttttggtaagcaacattaataaattgactcccaagcaaacagggatgatgaaagcaccgactgaagtgttgtaagctaccgccgcagcagaaggccaacccatgtcgaaaattcccaattccaatccgtagatttcaaccattttacttaatgccggacccagactgctggtgagcaatgccgtcactactgataaaccaacgaaaccgacaccaaccaacaaaccgctcttcagcgctttgggaagtttaataccgatacatactcctaaaatcgtgaaaatgattggcatcattactgccgctccaagaccgataatgtacttaaatacttcttccattctgttctattttttctctgttttaatgataaattacctgtgtttccccagagggtattagttgtaaaccgtgccaaaagtaagaccttttttgctttcttccaaaacgaaactcttaatttatgagatattgcatcaaaaatggacatttttgacgtttgcgtgcacaaaattagtcgtttccgtgcacgaaaaacaaaaaatgcacctacttgactaaaaaatcccactgggtttggaggaaaaacactactttcgtaccgtgaaaaaagactatgttgaatccttaaaataacaaaccatgagacgaactcctttttataatttttttatagtggctttattggttacaatgaccgcttctgtatcggcacaacaggtagacagcaaacttccctggtctgtgcgactgactgaatcggaaatgatccgttaccccgaatcctggcagctcgactttcaaccgaaactgaagtgggattattgccacggacttgaactgggagccatgctcgatgtgtacgacgcttatggcgacaagaaaattcgcgattacgccatcgcgtatgcggatacaatggtgcacgaggacggaagcattaccgcttataaattaaccgattacagtcttgaccgtatcaactccggaaaaatccttttccgtatctatgagcagaccaagaatcctaaatataagaaagcgctcgacttgctttatagccagtttgaaggacaaccgcgtaatgaggacggtggtttttggcataaaaagatttatccccaccaaatgtggctggacggaatttacatgggagctcctttctacgcggaatatgcattccgtaataatcttccgcaggactatgcagatgtaatcaaccagtttgtcacttgtgcccgtcatacgtacgatcctaaaaatggtctttatcgtcatgcgtgcgatgtaagccgcactcaacgttgggcggacccggtgaccggacagtcgaaacatacgtggggacgtgcgatgggatggtatgcgatggcattggtggatgtgctcgaatttattccgcagcatgaagccgggagagattccctgcttgatatattgaataatgtagctgtgcaggtgaagaaacttcaggatccgaagaccggaggatggtatcaggtgatggaccggagtggtgataagggtaattacgtagaatcttcctgttccgctatgtttatttattcgctctttaaggcggttcgtttgggatatattgataagtcttatctggatgtggcattgaaaggctacaaaggattcctggagaattttatcgaagtggacaagaacggattggtaaccatcaccaaggcttgtgcagtggcaggattgggaggaaaggtctatcgttccggcgattatgactattatattaatgaaactatccgcaataacgatcctaaagccgtaggaccttttattatggctagcttggaatacgaacgtttacaaaagtaatttccgacaatgaaaaggactatttttaaaggaatgatgtgtttgcttctactggctgtgggagcaacatctgtttatgcacaacaacagcaacgcaaagacacattagtcgtggcacgcgacgggacaggggagtatcgtaacattcaggaagccgtggaagctgtccgcgcttttatggattatacggtgacgatctatatcaagaacggtatatacaaagaaaaactggtcattccttcctgggtgaagaatgtgcaattagtgggcgaaagcgcagaaaaaacgattatcacttatgatgaccatgccaatatcaataagatgggtactttccgcacctatacggtaaaagtggagggaaatgacatcactttcaaagacctgacgattgaaaataatgcggctccactggggcaagcggtagctcttcacaccgaaggtgacagactgatgtttgtcaactgccgtttcctgggaaatcaggatactatttatacaggaaccgaaggagcgcgtctcttattcacaaattgctatatcgagggaactaccgattttatttttggtccttccaccgctctattcgaatattgcgaactgcatagtaaacgtgattcgtatatcactgccgcttccactcctcaaagtgaagaattcggttatgtatttaaaaactgtaagttgacggccgctccgggagtgaaaaaagtatatttgggtcgtccgtggcgtccttatgcggcaacggtctttatcaattgtgagtttggcaatcatatccgtcccgaaggatggcacaattggaagaatccggagaacgaaaagacagcccgttatgccgaattcggaaatacgggtgcgggcgcagatacttccgggcgtgtggcatgggctaaacagttgacaaataaggaggcaatgaagtatactccgcaaaatatctttaaggaaagcagtaattggtatccctataaataaaaatacgtaggttttccgactgtttatgcagcttgaaatttttgtttccgggcttggctctttgctttccctagcttaaaactcctgttccaaggcaggaaactgcagtttctctacgtggaaactagcgtttcttcccggggaaactgtagttcctatgcgtggaaactgaatttgcctgcgtgcaaaacaggattatataaggtgttgcagataaacatctgcaacggtatctgcaacagtatctgcaacgctgcaatcagttgattgcaagtaagatacaagcaaaacgttgcaggtggcagataaaaacaaaaaataaaactcgtaagaggggatgaagaatatgaaaacacttagggttaaaatggtagggctacttgcaacggctcttattcttttttctgcatttcgtgcagacaaaccggtcatcactatctttatgataggtgattcgacaatggctaacaagaaaatagacggaggaaatcccgaacgtggttggggaatggtacttcccggattcttctccgaagacatacggatagacaatcatgccgccaacggtcgaagttctaagagctttatcagcgaaggacgctgggaaaaagtaatttctaaagtgaaaaaaggagattatgtctttattcagttcggccataatgatgagaaagcagactctacccgtcacaccgatccgggcagtacttttgatgaaaatcttcgtcggtatgtgaatgaaacccgcgccaaaggtggaataccggtattgttcaactctatcgtccgtcgaaatttcgtacagccgaaggatgatgccatcgcaaaagatgtccgccgcacaccaggggaaaaggaacaaccgaaagaaggaactgttttattcgatacgcatggcgcctatctggattctccccgcaatgtggcaaaagaactgggagtgactttcatcgacatgaataaaatcacccacgacctggtgcaggaactgggaccagtagaatcaaagaaactattcatgtttgtcgaacccaatcaggtgccggctttcccgaaaggtcgtgaagacaatactcatttaaacgtatacggagcacgaacaattgccggactggcagtggatgccatcggcaaggaaattccggaactggcgaaatatatccgtcaattcgattatgtagtggcccaagacggtagcggtgatttctttaccgtgcaggaagctatcaatgctgttcccgattttcgcaaagacgtccgtaccactatcctgattcgtaaaggaacttataaagagaaactcatcatccctgaatccaagattaatatctctttgattggagaagacggtgcgatactgacttatgacggttttgcaaacaagaaaaatgtatttggcgagaacatgggaacttccggttcgtccagctgttacatctacgcccccgatttttatgcggagaatatcacattcgagaactcatcaggtcccgtaggacaagcagttgcctgtttcgtatctgccgatcgtgtctattttaagaactgtcgtttcctcggcttccaagataccctctatacatacagcaagcaaagccgccaatattatgaagactgctacatcgaaggaacggttgattttatcttcggctggtctacggctgttttcaaccgttgtcacattcatagcaaacgggatggttatgtcaccgctccctctacagataaaggaaaaaaatatggctatgtattctatgattgcaaactgactgcggaaccggaagctacaaaagtatatctgtctcgtccctggcgtccgtatgcgcaagctgtatttatccgttgcgaactaggtaaacacattctccctgtcggttggaataactggggcaagaaagagaacgaaaatacagtcttctatgccgaatatgagagtcggggcgaaggagccaatccgaaagcgcgtgccgctttctcccaacaactgaaaaacctgcaaggatacgagattacgactgtactggcaggcgaagatggatggggtccggtagcggacggaaacaaactgataacagtgaaacgttgacttgacgaatatgtaaagaaatgaattactaagcaaaaaacaatggatatataaaagacaatagatcacttgtcctatagaatggttcgattctgttaaatagccgctaaagattgcataaaagtacaactatttttctatctttacggcacagaacctagttatatgatgaagaaaaccttaatttcagtaattcttttgctagctattgtgttctcgacacatgcgcagcagcactgttttttcacccactattctactgaagatggattgtcccaaaatacggtgatgaacatcttgcaagatcacaaagacaacctttggtttgccacttgggatggaatcaaccgtttcaacggttataccttcaaaacatataaggctcgtcagggaaattacatcagtctgaccaataatcgcgtagaccgtatctatgaagaccgttatggttttttgtggctactgacttatgataatcgtgtccatcgtttcgacccgaagacagagactttcgaacaagtacctgctgccggagaggaggggagtgctttcaatgtgcataccattgaggtgatgccgaacggaaccgtctggctgctgacagaaaatgacggagctatccgcatcctgactcatccaaatgagaatcatcgcctgacatgggatatttattccagtaagacggaactgtttccctctttacatgtattcaaagtttatcaggataaagcaggcaatgactggctgttaacagacaacggcctcggcatgatccatcccggaaagaaagaaccggattcctatttcacggagacaaaaggaaagtttggcggaatgaatcaggctttctatgcagtacaggagcgggataaggacatctgctttgcttcggatcagggacgtatctggtcttatcagaaagatagcggagaatttacgttgatcgaacttcctacaaaagggcagatcacttccattcaccccgttgcaccggacgtttctgtaattactaccgattcggatggtttctttacttataacctgcggaccaaaacaaatgtgcattactcattcctgacttgtaaggctttacccgcaaaaccaatcctttctgcttatgtagaccgttcttcggaagtgtggttcgagcaggaagaaccgggtgttgtagcccattttaatccctcgaccagagtggtgacccgtgaacagattcttattgaatacagtaatcctgaacgttcccgtccggccttccatatccatgaagatgtaaacgggtatctttgggtacacccttatggaggaggtttctcttacttcgatcctcaaaaaaaacgattggttcctttctataatggactgggtagtcgtgactggcgtttttccaataagattcattcggctttctccgacaaacaaggtaatttatggctttgcacccactccaagggattggagaaggtgacttatcggaatgtaccttttgcgatgatgactcccatgccgcatgaacatgaatcattgcataatgaggtacgtgccctgtgcgaagacaaactgggtaatctgtgggttggcttgaaagatggtatgcttcgtatgtatgatgccgataaagcttataaaggatacctgaccgaaagcggcatcgtttctactaccggtactcccatgttgggaactgtttattttgttattcaggattcgaaaggaatcatctggattgcaacaaaaggagacggacttgtccgtgccgagccgacttcttccaacggaatgtcttataaactgacccgttatcttcatcgtgaagaggatatgtacagtttgagcgataataatgtgtattgtatctatgaagatcattatggtcgtatttgggtagctacttttgccggaggtatcaattatatcacgcagaatgaagcaggaaagacattgtttatcaatcaccggaataatctgaaagggtatccgattgatccttgctacaaagcgcgtttcattacttccgataataatggacgcctgtgggtaggtacaactacgggagctgttgcttttgatgagaactttaagaaaccggaggatgtgcagttttatcatttctcccgtatgccgaacgatacgcaaagtctgagtaataatgatgtccattggattatttccactaagaaaaaggaactgtatctggctactttcggtgggggactcaacaaactgatatctatcagtaaggacggccacggagagttcaaatcatattccgtactggacggtcttccttccgacgtcttgctttctgcccgcgaagatagtaaggagaatttatggattagtacggagaatggaatttgtaaatttatcccgtctgaagaacgttttgaaagttacgacgaacgtagtattactttcccagtgcgctttagtgaagcggcttccacattgacggctaaaggaagtatgcttttcggtgccagtgggggagtctttatatttaatcccgactctattcgtaagagtagctatatcccacctatcgtattctccaaactgatggtgactaatgaggatattacgcccggagataactccttgttgaaggtggatattgacgataccgacccattggtgctctcacacaaagagaatattttctccgttcacttcgctgcactcgattatactaatccgcagaatatacagtatgcttatattctcgacggatttgagaaacaatggacttttgccgacaagcagcgtagtgtgacttatacgaatcttccgaaaggagagtatgtgctccgtgttcgttcaacgaatagtgatggtgtgtgggtggataatgaacgtatactgaacattgttattctgccttctttctgggagacgccggtagcttatgtgctttatgttctttttattctgattattattctcgtagccgtttatatcctgtttactatttatcggttgaagcatgaagtttcggtcgaacagcagatttcagatataaaactgcgtttctttactaacatatcgcatgagttgcgtactccgcttacgttgatagctggtccggtggagcaggtcttgaagaatgataaattgccggctgatgctcgcgaacagttagtggtggttgaacggaacaccaatcggatgctccgtcttgtcaatcagattctggacttccgcaagattcagaataagaagatgaagatgcaggtgcagcgggtggatattgtacctttcgtccgtaaggtgatggataattttgaagctgtggccgaggaacatcggattgatttcctgttccagaccgaaaaggaacatctttatctttgggtggatgccgataagctggaaaagattgtattcaatttgctttccaatgcatttaaatatacgccgaatggcaagatgattacgatgtttatccgggaagatgaaaagacagtttctatcggtgtgcaagatcaggggatcggtatcgcagaaaacaaaaagaagtcactgtttgtccgttttgagaatctggtagataagaatcttttcaatcaggctagtacgggtatcggactttcattggtgaaagagttggtggaaatgcataaagcgactatttccgttgatagtcatttgggagaagggagttgcttcaaagtcgatttcctcaagggaaaagaacattacgataaggaagccgagtttattctggaagatgcggatgctccggcaagaatgggacaggtagtggatattgccaattcttccattcagtctgaaacgttggtaagcgatgattcggagaagattgatgatgtgtatggggaagaatttgcgaaagaagagaactccaaagaattgatgctgttagtcgaagataatcaggagttacgtgaattcttgcgcagtatattttctccgatgtaccgggtggtggaagctgctgacggtaaggagggggcaaacaaggctttgaagtacctgccggatattatcatcagtgacgtgatgatgcctgaaaaagacggtatcgaaatgacgcgtgaactgcgtgcggatatgacgaccagccatatacctatcattttgcttactgccaaaactacgattgaaagcaaactggagggattggaatatggtgcggatgattatataacgaagcctttcagtgctacctatctgcaagcacgtgtggaaaatctgttgatgcagcgtaagaaactgcaaagtttctaccgggatagtctgatgcatatcaatatttctaccggtcaggaggaagtgcctgtggctacggatatgccgtctgctgaagaagatgtgtccgaaactccacctacaactctcgaaatgtctcccaacgaccgtaagtttatggataaattgattgaattgatggagcagaacatggataatggagaactggtggtagatgatttggttcgggaactggctgtcagccgttctgtcttcttcaagaagctgaaaacacttaccggattggctccgattgaatttatcaaagaaatgcgtatcaagcgggctacacaattaatagaaatcggagaatttaatatgacccagatttcgtatatggtcggcattaatgatccgcgttatttcagtaaatgctttaaagcacaggttggaatgacgcctacagagtatcgggatagagtggggagataataataggaaaggaaagaaatagaaagggggatgttcaaagctccccttttatcgaaatcaccctcactacaactatctgtggcgagggtgattttttgtttatgagagttccgatacatttaccctcatcttggttatccgaaattattttttagggtatagatgattcacaaggctgttcatatacatttccaggtttgtatattccgggcttaatgtatatttggctccgtctgaaggatcattgggattaaggttgtgtttcttttcccattcatcgggaataccatcaccatctgtatcaacaagtgctgtttctgatttatattccggccatcctcctacatcagacggttggtcaatcattccattcgtgcttccgtgagaaccttcgtaagtataagtgcctttgagagtttcatctacgatgcgttggtctatggcgtcacggcgatatgaagcaccggcaaactcgagaacatctttgtaggctttcttggcaggttgcaaagaagtatgttcggctatgtcaaatgcttttttagacagtacttccttttctgtggcaaagtcctttttgataaccagtccgtaagagttatccatattcactttataaagagcctctttctgcttatcggtcagtttgggacaggtaggatccatatagttacctttgaaatagaatacaccatgaacacctgctttattgttgtttttgccatcatcggcatacgctgtaaacaagcgtttgaaagaaccttttgtcgcactgaaaggtcccggtttatagtagttattgataaagttgtaggaacctccttcaccggcataagcaccgtcactgccataattataaatcacattattgaataattccactttttcatcttccggacgacccgtataacggcttccgcaaagacggggtgtgcggttagtgtgatgggcgagtaagttatggtgaaaagtagcaggttgtccaccccagatacccccataaccatgtgctcccttttcgtggatagaattggcgagactttcactgatgatgcaccactgaagtgtgaaattacggttatcatagaatgtggcacattcgtccgtacaccaactcatggagcagtggtctatgataatgttttggtgcgctttagtaccattcattgagtcgtcacctttttgtttgatgtcgactcccatacgggaacggatgaaacggacgataacattgtctgcctgaatagagaatgtatagtttttcaggcaaatgccatcacccggagctgtctgtcctgcaatggtcacatcaccattgctgagttttaatgctttttgtaattcaataattccgctaaccgcaaagataatggtgcggggacctttcttgctgatagcccagcgaagtgtcccttccgaaccgtcgtctgccagggacgtaacagtgtatacagtacctccggcaccaccggtggtatattttcctgctccgtcggcaccggggaaggcgagaactttggaacgatccggggtaggatagtcctttgatgttttttcaaccgaaatggcaggttgcatggcttgtcccactagaggaaaagccaatatcaaactacagattgctaatatattctttttcattactaatttatcatttgggtttgaatttactaaaattattctataacactgccacctgtcgcaccatttaccatgatttcgtgcaccagactattgagatacatttccagattagtgtacttcccgtttttgtcaatagtcgtttcttttccatcagcagatttcttgggattcaaaccatattcttcttcccagtagtcgggaataccgtcaccgtccgtatctttcacgtttgcattggttacagatttcagaacatcgtagggatcacttactcctaaggctgtgcagacatctttcgggtcgttgatatatccacttttgttttgtgagtagccggaaagaccttcccatttgctggcatctcccgtgcaacttgcttttctgtttttaacgtcgctaattatcaactcgtcgactttatcacgatagttgctggctcctgcatagctcatcacacgttcataagcctcatccggcgtatgagttcttacatttcctgtcttaactaccggtgaacttgattttatctgggtatgttggttccaaagctccgtagttgcacagtttttattatccatttgttcaaatacgccttttgtccagttatcattgctaacagtcgtattgcctaccactttatttccgtcgatataaaacttcccccaagtttgaagccattttttgtaagcttcgccggagtaattttccggatatacatccggcttggcgatacggtaagcacggtctgctttaccgctttcatcggttccggggcctggcttgtagtagttgttaacgatattcacgtgttgcgcttcaccaccgtagcagccttcgcctccccaattgtagtaaacattgttgcgcatatccactcgctctccatcgttgttgttcagtgctaatgtagtatatcggggaccaaggcgtggaacacggctttcgcaatgggctatcaggttatggtggtaagaggcatagtttcctccccagttaccgccatatccgtgagaagcgaatttacctgtggcagcattgatctttacatcagtcacacgtaaggcttgataagctaaacaccattgtacggtagaattttgcataccatagacagaaagacattcatcgcttccccagcttactgaacaatgatcgatgattacattttgtttgtcacaacctcctaatccgtcgcagtctacgttagagtttccggggcgaaaacggatgaaacgaatgatgatattgctggaattaatcgtaaatgggtaattggcgatacagataccgcccggtgatgtttgtccggcaatggtcagatcatctttctgggtttttaattccgatttcaaatagatggtacccgacacatcaaatacaatcgttttaggaccgtcttgtttcatagcccagcgcagacttccgctgatacttccactggtgtcgtcttcaaggctagtcacatgataaacttttcctccgcgtcctccggtggtattgcgaccgtggccttcggcgtatgggaaagcaagaagttctccataatccagttgcttgacatcagaagatgtcccacctggattatttgttcctccacctgtatcatctacaggatcgtcggaagagcatgaggtacataatcctgcgatgctgaatgcaatagctacataaaatagagatattttctgcttcattatcttttaactgtttggggatatagacgatttatttgttgggatacaacgtttctaccagactgttgaggtaaacctccagattggtatacgttttacttagagtatatttggcaccgtcggccttacttttggggttcaaaccgttggcagtctcccattcatcagggatgccgtcgccgtcggtgtcttttggaccggtttcctttttatattccggccagccacctacatcgctggctttatcaatgagtcccttttcactgccattgctgccgtctgccgtataatctccgttgcgaacgttggctatgatgcgtttatcgacatcatcatattttaaggaagcaccggcatactttaatactgattcataagcttcttttgccgattgagtgaattcggatgcatcttcggaaatagtaaattcgttacttgactgaagtgctttttctcctccatcgggtaaaggaacggcttctgttgcattggggtgtaacccttgccagttgtcattgtttacagaagtaagcagagattgatattcggctttcaattcaggacatgtgccatcaaaatagtttcctttcagataaaaagtaccccatatacctttggtgtttttatttgtaccgtcatcaccgttaggttggaagatacggtttacaatatttttcttggtattggtaactggtccgggcttgtagtagttgttcacgaaattatagcttcctccttctcctgcatagccaccattggtcggtccccagttatagaaaacattatttcgtaaatcgagtttttcattttccggtttccctgtatagcggctaccgcataaacgtggtgtacggctgctgtggtgggctaataaattgtggtggaatgtagcgggtgatcctccccatattcctccgtaaccgtgattacctttggtgtgtaccgaacgattcaaactttcgctgatgatacaccattgcatggtaaagttagtgttatcgtagaaagaagcacattcatcagtgctccaactcatcgaacaatggtcaatgataatatttttatgttgctttccccacaatgcatcaccgctgtcggcttctgcttctgttgtaaagttgtccgatcccatgcggaaacgcatgaaacggatgattacgttgtccgcctgtacggatacgggatgtcctttcaggcaaataccgtcacccggtgcactctggccggcaatcgttacatctccgttggttatcctcaaggggcttttcagttctatcaatccacttactgcaaatacgatcgtgcgctttcccgtgcgatttaatgcgtagcgtaatgttccttgtgttgtcttatcgttgtcttcaagcgaagttactatatatacatctccgcctgctccgccggtagtataacgacctgcaccgtaagcacccggaaaggcataacgcgtttcggcaggtgtctcttcttcaccaccttcgttctcattaccaccgttaccggtattctgtcccggtgtttcatcggtgatacttgggtcttcgctgctgcaagcaaccgataggttgattacacagaagcacaataatcccattttaatagatttgagcatacaaattatcttttaaaaaaatagagttctttgtctcatacattatatttgctgatgatgtgacaaagaactctttattaaatcttattggttttattcgcttactgtaccgtactggcttacagttttcactgtataaatattgctttcgtcagtgttggtcagtgtaacggtagtgtctgtcgtttgccctgcatagttaccattcataaagatgaggtagccggcagcaccggatactgcatcccatgtcagagtgtttcccgacagattgacattggtaggtgctgcaaggggagtttccatatactctttcgggttccagctgtcaatagttattatattctcatatgtatatttagcagcttcggatgctgttagcactgaactagtgaaggaaacgtttccggaggtgattgttttactttccgcaatcatatttccattcttgtcgatagtgttatattcagcatatagtgtaggtacttgtccaccatatccccagtgtgaatctataatatccattttcaacttggtgttgatccagacagttttcgtggttgtggcttgggaacgtccgaatgagaattttgtatcatcaccgtttaccgtacaatcttttataacatatccgtatttatcgctttcactggtacgcgaagcagttataacgctaccaccgtcattgcctgtattatagaatgtactgttttcgataagtacatcgccacttccccagatataatctgtatgaccttcaatccatgagttataaacgtatgcacgatgaggggttgtattgttccaataacgggtccaccatgtatcctggtaggagacaagcaaacagttattcaaagcaaagcggtcttcacggtttatcaaggcttctgcctgtccgtttttacctaaaccaccagtgtgacgatttgagaatgcaccataaagattgatgattgaaatattttcagcataaaagtctgtggcttcaatcaacactactgtgttttggtcttcactatatccggctttgcgggctggtgaattttcgttgaaaatagaataaggccatgaggtagcattacttgaatcatctacacggtttactgcaaactggattttaacaccatcacggctctcaccgattaaatgaacaaatggtttattcttattgatccggacacattcattataagttccgttggcaatgaagattttataaggactggtaggtggggtagtgatggcgttgattgcagcctggagagtagtgtaatcaccattcccttttgaatcaacaattgcatcgaatacttttccaccgcccgaaatttcagatttggcagtaaagcttaaaaagaagtcttcgtcgtaagctcttccctgcatatccgttaatgctccggcaggaacttcgaaagtacattctttgttttccataccagagaaggtataacgtactttttcgtagttgatggatacacgcactactcctccgttgaaatagatttctgtatccggagcctgacgcatagctttgctgaaagtcagttctacatatccgctcggacctactacatcaccatcattgatattctgtgaaatcagaacagggatgcttgtatcttctgcatcatcgttgtcattacaggaagcacctgtaagaatcaacaagaacagaagtaagtatttacttattgtattgattgaatttgtattcataatatctgttgctttttagagaagattctccgtcaagtaaatgcaaattccagacttgacggaaaaccttgtagttttatttagttatttgttccaacgttggtcaccgactctgtattcttcaggaacatctgctccaaaagtcaaatcttcacttgaaccattagggaatagctgatcggaagtcagaggaagactagtatagtcttttccccagtcgggtgtaacaaatgaaaagtcagaagccttatacaagccgtttacgttcagggttgtagctacggaacttgtgttgtagaaaggtttaactccacctttggcaaacagggtgtttgatatagttattgtcatgtcttttgtatctctgcagaaagcatcacttgctgacatatcatagaatgtacaatctttgattgttattgtaccgggttgtcctgacttgtgtcttatgaattgagacgcagaagctcccttggatacaataatagaagtgttggaaaccactaaattgagagttgttaatgttaccttgtcagaaagaagtaatccataatgattggatgttgctgctcttcccaatcctttgatgatacagtcgtcaatagtaacagacatagcattacttgtacttgcattcatacgaacgataccacggatattggtaattgtacacgaggtaacttctatttctttgatgcaacctgaagcaccgttttgataaataagggttgtatttccttcatcggtaatattcagattatggaattctactttatcacatattccgctggcacctatgccttttttaatagtcatattaacctgtccgtcttgactgtcaccccagaaaataaggtgagtcacgccagcagcaatgctttctttttcttgtgcaaatccttctgttccggaaacattgattaatacttttcctgaaagattatcccagttggcaagggcatcttcccatgtcatttcagtataccccgtcggtttacctttcttagttgtaaaggtgatacgagaacatatagagccgtttgcgaaagcataagccgtatattccgtactggaagccaaacctgtgattgccaccttatgtgcagcaatatctgctggtgataattgggttcctgattcaggtactccttcggtagaaagaacacaagcatattcatctacatccaccgtttcttcccatgagaatacagctgaatttgctgttatatcactgatggtagattcgatttccaaaccagggatggtaacagtctgtgaaccacgcggattatttccattataaatagtaatcgtgtattcagtgaatgacttcaaattttcaacccatgcttcacctgcggcagcttctgttgacgaaataacacgtgaagttgcttctgtggcacccgtttccatgatttcgaaatgatcgactgctaatccggcttcccatgacatacgtacttttccttgaccttcaggtaagtcttcagtagttggaatatttaggatagcttcttccttaactgaagcaaaagtctttttataatttacccaacgagattccttctctccggaaatagacttgatacgcatataataagtcgtatttaccgccagattatccattgtgtaaggtgactgcttgatccggttggcaggatcatttccataaacgatatttccattttcttctgatcccattggagtttcgtcagtcatctcgttaggactaatctcgataatgtaatagtcggtattggatgttgagctccaagttactaccgctctggctactttactgtctgtttctatactgattccgttttcatcagttccgaaaggacggctataggaagagtcaatatcccaatcacttttctctgtacacgaagatacagccaaagaggtcaggagcatgaaagctcccattcccaatatattttttatattcttcatcattttacgattttaagattaatccgaataaccataagagttatgtaatttaccgtttgaggtagagatggttgtagaagctatcggcaataaataacgattcttcacagccttgttcaatccgccagaaatactaggcaagtttactttcagattcttttgctccttgtcactggtttcagctccgaaaaagctcttgttttcatattctccacctactttagctccaaatacgagagaagtcatatcgatatacatcggattgtccgtgcgatatttatagttcacatactgtggatatgtaccattatacactgcatttgtatattcgtttttgaattcgtctattttttcgctcaacaggttccaacggattaggtcgaacttacgaacaccttctcctgccagttcccatgcattttcgtcaacaattgcatcgaagaagtcttttcccattagagcagtccatgcagcatcacgtttggttgcatcggtgaaagcacggtcgtgtacttctttcagggctgctgtggctgttaatgtacaaccttcggctgttgcacccttaccataaagttcgttcacaacttcggcatacatcagcaatacttgcggataacgcattttcactacgttgataccggaacaaactttctgatcgctggccaatacagctgcgtaccattcagagttttccatcatcttacgataatcccattttccacaataaagaccgaaaggagcatttcctaacatatattctttaaatactttggtgtttttgtctgtagaaagttgtgaaatagcacaagtcagatcgcggcggatatctccttcgccaaatgacagataataaggagcagtcagtttcaacttaccggatgagttacctttcggaccaaatagggaactggcaccgtttatacgatatccgatagtatatcccagctcaccacttttgtttagtcccattggaatctcgaacaggttttcttgataagtctgatctagttgtccgatatttattaaacgccagtattcttctacagaaggattcagtttatgttttcctgaactgacaacagctgccagatgtttttcggccaattcgaatagttctctacgtttggtatcgctgcaacgttgagtaggataagtagcgtcactgttatctccggtgatatatccgtctttagcttgttcgcggatagcatatccggcacgtgtcattgcaatgttagccaagagagcgtgagcatagcctttgcttacatgttcggttgtataaccgtcttcaccagcccaaggtaaatatccgatagcttcctcgagttcaattatcaattcatccatgatatcgtcacgatctgcctttccaatgtaaacattagacaggtcgctgttggaagattctgttttgaaaggaatatcaccgaacaagcggatcagatcgaaataaatcatcgcacgcaatgtcatcgcttctgcacggaatctcatcatgctggtacgggttgctcctgcttgttgtatcagttggctattgtttataccatctactaccagattcgcattctcgattactccgtacatggcatcccatactttggaaagttgtgaccatcccggattagcgttgtagttcatattaccacgttcgctggacgtgttgcttgcatccgtacccaaaccgtcaatcagttcacagtcggtattggttccggcaatgataggtaggaagttagaataagtctggtcttgcgtcaggctgccgtaaactttattaagtgccaattctgtataataggcattattaaaagttgattcattatccaattcagacggtgaggtctgattcaggaagtccgaacaggaagacagggcaattaaccccagccccaggaataatgtcttatatattttcatacgatcaatctgtttaatgttttaattagaatgtaacgttaataccacccacaaatgtgcggctcttaggataagcggcgtaatctatacccggagtcatcgcatttttcttactgcttgtatcgacttcagggtctgctccgctgtagttagtccaacagaacaggttatatcctgtcagatagattctcacattctgcataaacgctctccttacaattgttttcggaagagagtatccgatagtaatgttattcaaacgcaggaatgaggctttttctactgcataatcagtcagctgcatggtagtagcgctggccggattgtacatattggcgttagcgtttatttcattcagacgtaatcctgctgttgtcatgtctccataggtattgaggacatctgtagagctggacgacaggttcaaaccagtttccggatcaatccatgtgtaacggttagacaatctgaaatcattgtttaagttataaccggttcttgaacctgaacggaaagaagctgccagttttgttccattgacaattacatttccgagagagtagttaaagaatacattgaaatcgaaattacctacacgaccatcgaatccaaaacctccggttgtaggagcgatagtgttacccaaacgttgtttgagagggttaccatctttatcacattccagtttcaaaccacccggatagtatttaccaccggtgatagtaggactgttatcttgcattccgtcttttaatccccattcgctacctgcccaaaccagttcgccggtagggttggtgacaggatcatatacagtataataaccgtttgtcttatatccccaaacttcacccaaacgtccgcctttctctacgcggaagtcttcgtatttggccattgtactacctgaccagttactactttgccagggagagtctgtattcagtttatcaatgcggttgcggttgtaagcaatgttggcattgaagttcaaagagaaattctttttatcaaataaaacagcactaacagacaattctacacctttattggatgtctgtccgaagttcttgtactgatagttatatccggagagagaaggaatttcagtacgcatcaataagtctctggttgtattccagtaaaagtcgatagcaccggagatacgattgttccagaatccatagtcaataccgatgttacgggtgactgttgtttcccacttcaaatcggggttgtataagttcgttccatgttccaacatggtagtgctttctccgttgaagaaaggattgcgtgcatcattacctcccaaagagtaagtggtggaaagcaaaccggaattgatacggttgttaccggcagtaccgaagcttaaacgtagtttcaaagctgacagccagtcttgagtgttactcatgaaagcctcgtcagagatacgccatgccaaagctgctgacgggaaaacaccccaacgatttccggaaccgaacttgctcgaaccgtctgcacgtactgtaacagcaagcaagtatttatccatcatagtatagttcacacgaccaaagaatgataatatgttttcttttgcagcaatggtagattggttggctaaagctttgcccgaacccatatttgctttcatatcatcgaaattcatagtaacagggaaagctacagatacattttctattgatttcctttggctgctgcttacttcatgtccgatcaatacattgagtttatcacgacctttgaacagttttttgttatcataggtcaatgtgttggcattacgccagctcatcgtcttttctctcaacaggtaggcttgtggctgaccgttatatccatatttagaattagatactgcatctactccccaatactgttctgtatcgtcaaacttccatccatatccgaattcggaacggaatgtccagttcttgaatggtttccagtttaaacctacattgtagttctggttgaaagtattgcgggttttatccgttgcaagcagacgttccaatggagatttctgttgtgccgaactgttttcttcgtcgtcatcactgtatttaagtgaatcaaccggacggaatatggtagcattagccacagttgaattggcagcattggattcattggtatcagcaccaccacctaaaccgtcaatggtagagtaacttaaccgggcgttaaagtccagtgtcatccatttattcagttctgatttaatttttgcatttacattgtcttttttgaagccggaattaagcatgatacttttttcttcattatgggcatagctgacactataagtcatttgcttggttccgccacttacattaatgttatattgttgctggtttccagtacgtccgaacatctcgtcttggtaatcggtaccatcaatagaacgccaaatatccatatcggcaaagtttccataatccagagaaccgatttcacgctgataagcaacgaaatcgtaaggactcaagacttcagtcagtttggttacctgtttaaaaccgaaagaagcaccgaagtctacttgcgttttaccttcttttccgctcttggtagtaatgatgattacaccatttgcaccacgggcaccataaatggctgtggaagaagcatctttcaatacgtcgatgctttgaatttccgagggagcgatatcactaatgcttgaaacagggaaaccgtctacaatatataaaggagagttatcctgtgatagtgaaccaccaccgcgaacacggatctttatatctgcatcgggagaaccttcagtagtagtaacactaactccggcaagtttaccggtaagggcttcagatgcacttgctactggtatagcagctaagtctttggcactaacagaggctacagaaccggttaaatctcttttattgaccgtaccgtaaccaattactacgacttcgtccaaagctttcgagtcgtcgaccatttgtacattaattgtttttctaccttgaacggctacttcttgagttttcatacctatgtatgaaataaccaatgtttttttgccatcaactttaatagaaaaattaccatctaaatctgtaatcgtaccattggtagtattacctttttctacaacagaggctccaataacaggctctccgctggtgtctttcacgttaccttttacggtaatcgtttgcgcagatacgctaagcgatattgctgaaaatagtattagcaataaggagcgcatgtttttcactttgttagacattctttgcatgtttattaattaatggttgttgtttgatatttcataaaaaatcccgatgagagttcattcatcgctacaaaagtatgagaatgaagatatagtgatgtgcaatatttgtttttcacctcgtattttttgttttttagtttgttgcgaggtgtagttattagctttgaagggtgttatttgtgttctaaaggccggcaaatatacgaatcagagatttataaattgattttttcaccggtttttatccggcattcatcggaatttataccgtaaatcaactgaaaagcctgtggaagcatagggaaatgatgtatctttgaaccattaatcaattaataatagaaacaatggaagagaaacaaaattttccccgtgctacaggcttttccggtaaaatactgatagctttgctttttatcctttccgggattctactgtttgcccgtaatatgggatggataacttcagaagtatttgatttgatcgtatcctggcattcactccttatattattaggtatatatgcaatgattcgccgccatttcatcggtggaatcatcctttttctggcgggtgtctattttctgataggaggactttcctggttaccggaaaattcacaggcaatggtgtggcccctcgctctgataatagcaggtgttttatttatcttcaaacccggcagaaataagagggcgcaatgggctcgtcagcatacaatggaacatcgtcggcaatggatgaagatgcatcagggtagacccggcatgaactttgagagtgagcaacaacaatcggaatcagtagatggttttttgcgttcggagaatgtctggggagctgcacgtcacgtagtacttgatgagttgtttaaaggagctatgattcgtacctctttcggggggacgactattgatcttcgccatacccatattgcaccgggagaaacctatattgatttggattgcagttggggaggagtcgagatttatgtcccgtcggattggacagtcgtcttcaaatgcaatgctttctttggaggatgtgatgacaaacgctggcaaaatgggaatgtaaacaaggagaatatattggtcattcgtggaacgctttctttcggaggcttggaagttaaagactagcgtatgaaaccacatccgataatagattatccattccgctggattccgatgctggtgctggcgttgattctggttgcgacacaggtggttttagtctgtggatataccggaaacgactatcttcctgctctggtagatggagtggcaacaattggttggctggcagccatagcctatttggcctggtttgtggtcggtcttgtttcgttgttccagacggatataatcatgataatcgttggaagcctgttatggctggcgggtagttttatgatctgtgatatcatggtgaggattgtaggcatatcctatattccttttgcgcagaccatacctttccggttattgttcggactgccaaccttgattgccattactttatggtatcgcctgattgtaactaaagaagaagtacagaatcaggaactggataaagaattggctgcacatcagctaactgtgaccgaacaacaaggagaaccacagacagaattaatagatcgcattacggtgaaagacggttcccgcattcatctggtaaagacagacgaactgatctacatacaagcctgtggagattatgtaatgttgataacccctaccggagaatatctgaaagaacaaactatgaaatattttgagacccatctgtctcctgatacttttgtgcgtgtgcatcgttctacgattgtcaacgtaacacaaatttcgcgggtcgagctttttggaaaagaaacttatcagttgttattgaagactggcgtgaaacttaaagtaagtctttccggttaccggttattaaaagagcggctggggatctaaaatttgttcaatcttatcataaaaactgatttttcccccatatcggtcaaaaaatgaatgtcagaatgaaaagcttccactacttttgtttccatcatctaataatgtgaataaggaaatgaaaagaaaattagtttatgtttgtctgctggcaatggttgcgggaggaatgatgtccttttcctatgacatacccgaaaaacaggagacaggcggccgggaagatcgagtgatctcttttcccggagctgaaggacacggtagatacacgacaggcggccgtggtggtaaagtgtatcatgtgacttctttggaagacgatggttcgcaggggactttacgttgggctttgaaacaaaatggacctaaaacgattgtctttgatgtggcaggtacgattcatctgaaatcggaattacgaacagggaaagatcatctcaccattgcaggacagacttctcccggaggaatctgtctggctgattatggcttttctattaattctaataatgtaattatccgttttcttcgtttccgccccggagaagccagtgggaaagaacccgatgggttgggcggctgtgataagaaagatattatggtagaccattgctctgtcagttggagtgtagatgaatgtctttccgtttatggtatggaaaactctacggtacaatggtgtattggctctgaagcattaagaaaagcgactcatgtaaaaggggcacatggatatggaggcaattggggaggacataaagcttcttatcaccataacctgatcgctcactgtgagagtcgcgtgcctcgtctgggccctcgtccttctacattagctcttggcgaatgtgttgatatccggaataatgttttctacaactgggctggaaacggctgctatggcggggaagatcagcatgtcaatatcgtcaataactattataaaccgggaccggcaacaaaacaggcttccaaacaggtgcaatatcgtattgccaaagtcggagtttatccgcaagcttatgtttacgttgatggagaacccaaaaagaacttggcttttcaaccttacctgcagaaatggggaactttctatattgatggaaataagatagaaggtaacaacaaagttactgccgataactggacggacggagtctatgcccagttgaagaatgatgaaaaagtagatttcctctggacagaagatgccaaagaatctatccgtctgaaagaacctcttgattttggagtaatcactacttattcggctgacaaggcttatgaacaggtgatgaattatgcaggttgctgtaattatcgtgatgaagtagacaaacgtatcatttccgacacccggaaaggaacggcaactttcaccggagaaggaaataaacccggatttatcaatagccccaaagacacaggcgattctccctggccggaattatcaatagcaggtctttcggcaccggtagattcggacggtgatggcatacctgatgagtgggaaataaaaaacagacttgatccgaataatcccgtagatggaaatacaaaaacgaaagatccgaatggacaatatacgaatcttgaggtatatttgaatagtttggtgcaacatatagtcgatgcacagaacaaataggtaatcagcaattccccgttcaatgcggagaatttagatgatatgcccttcaggtgttttatgataacatttgaagggcatatcttttttgtgcatggctataccagaggggcacttttttaccccagtccgttttttactccttttctactaaatcttactctatcttctcttgcttaatcctcaattttgcactggtgaaagaacaaagaattcactctagcgaaaaacatcattaatgtacaatgaaaatctaaacagaatgagaaacatgaatttattattccggagtatgaattctccttgaaaagcgaccctgttctttgggtgaaaaggaccataaaaaggtggttgtatttttatattgtatatctttaaactgtataaactaatatttatgagacatctaacaagaattttatttttattatttctcacctttttctcttgttcacagcaggtggaggatggatgggagtctgatgagttaccttgtgagcacgaaacgcatcctgtaagcgttagttttagccgtgcaagtcttgaaacctttaccgaagaaggcataacggagattggcatttatgcgtatctgaaagattctatggtatatggaaagaatctttctttaaatgatggaaacttacaaatagatcttcctctcggagaaaatctgcaaactttcgctgtagcaaatgcggatcatctgaccgatgtagacagcctctctaaagtagtagtgtatcaagatatctatgcacaaaaacaggtgtatatttcagatgttgtagatctgacctcagactattctgtcagtaatctaagtctggaactgaaacgtttggttggacaagctacattccagcctagagaaactgcagatgaactcaatgctattactcggtttgaccagttgaatgtcacttttacgaatgtcggtgtcgcctataaagtaaagaccggtgcatgtgttcaacaggatataacgattagtgtggatcgggctgcaggctttagtgcatctgtttattcgtttccaacaatcaatgcagacttaagaacgtcggtagatgtggtatatttgaaaggcggagaagaagtaaaccgcacaaatagtccgcttgatacaggcattgcctttgaatcgtccaaacattctatagtctatatgcctatattagaggaagcgtatttacaaaattcgtggactcgtagtctggtcatgaggaaaactgatatgttcccccaaccatttacaatagaagaatctgaattttaaaacaggagtcttatgagaaaaaatataatttattctttagtgggattggcacttctgctgggtacgtatgcttgctctgatgatgataagtattcgacttcagtagtaaatcaaattgaactatttttggatgatgaaccgtgggcagtgaatacaggattgtcaaccaaacctctttttatatataaagataacggagagtattttgctaattatacctcacattatcgtttccagttacctaatggaaaatataggattttgtcaacaacacagacagattcgattccttgcccgagtaatttgaatgatattgttattcggcaagacccggctgcaaaagtgaagtatgctatttcagctcctgtggaatacagttccccattcaatgatccgttgagtattcgtatgtataaccggacaggagtgatccgtctgaaagctacagataaaaaagcggataagagatattcaacggtacgcgctgtgctttcatgtccgatttccggttataaagtatcagatgccagattcatagaaacgccgatagaaattatccgcgataaagctaccagcagtggtggtgtgaattatacagatgatatggtgttgtttgagacacggacgataggaaaagagataggtattcgcattgattatttggatcagcataataatgtggtgcagtcgaaaactattgatggtacattccctatattgcccgatgatactacacaggtggcttttgctcttaataacgccgacgaaccgatgattcaggattataaagtgacgatagcgtcggaaggatgggatgaagaagaaataaatccggaagccccgatgagaataccggatggatatagatatgtgaatccggaagagaatctggaacagatatgcaaagcgttgatggcggatgtgactgtaactgaagtgaagctgttcttgaaagcagggggagagtataagttgggaagacagactgattttggaaagagtctctatattgtaggacagaaaccgataaatggacaagaactggcccatatggaaatgggtaatatgagcatatctaccggtgataacaaaattgatgctgttcattttgaaaacctgaatataaaaacgacagactcggattttttcaagttcaaaaatcaacatttccatgtgaaagagatttcgctgaaagggtgtgatattaatgatttgggacgcacgatgtggtatcaggaagtaaatgccaaactggcacaaactgttgataaccttattattgaagattgccgtttcttcggcttaaattcaggtagcagcggattgtttgggttgtctactaaacaggatgctcctatttacaatattgtgttcagaaattctacattccatgcaaataatctgactaaagcattgataacaggtttgagttccatgaccggtgatttgagtatagccatagagaattgtacgttcatcggaatggcacctgtaggtatgacattctttgatttgtcgccgaagaataccagcagtttcacattgacagttaagaataatctgttcagtggcatatccgaagaaggaagtggtacttggtttaatttgagaaatgtaacaggcagaacatttgcagacaattatcatacgcagggtttcgtcatgaatacttggggagtaaacgataatgaacttccggctgaaacaacttcaatgagtgcactctttacggatgttgagggaagggatctgactattaaggacaagagttcggaagtatataccaaaggaatcggtgatccgcattggattaaataatagttaaagtataaacgaataaattatataggatatgagatcatttctaatcatattattggcaggattgcttggggcttgtagttcggatgacgaaaagaacgaagcagcattagctaataacttggaagtatcaaagaatgaggtgaaactcaccaacgtaggaggttcttttactatcaatgtgactgcaaccggcgattggacagctaaagtcacagaaagtaatagtagctggctgactctttcgaaagaaagtggaaatggaaacggcgatcttcgtttattcttcactgaaaacacagatgacgcgaagcgtgaaagtaagattaaggttactttgacgaatgttaatacgacgattgaacaggaaatctctgtagaacaactgggtactgatccggatattttgctggattattcaaaggaagtgattccatttttaggaactactctgatttgtcaggttgtatccaatgtggcatggaaaatagagattgacgatcaaaccgactggatcaaggaagtcgatcagtctgcacaggagagccgtagttttgtgacagataatgttcactttgctattgcattgaacgtggcagcggagagaagagggaatatcgtatttaagacagtgggtgattacatcatgagtaagactgtggagattgttcaggaaggagtcaaaacgactctggaagtagagcaggatgaatatattattccttataagtgtaaggcactaactattcccgtcactcaagaatatgcaatagaatatacgatgacttcaaccgaaccctggattactttggataaggaagcttcgacagaagatgcaatcgtactgaaaatacaagataatacagatcgttttccacgcacttcttctgtgatcataaagaacagcgtgttggaacagaagatagagatttttcagtatggtaaacctgatacgagtattggtgacgacccatcggccggacaacttttggctttccccggtgcggagggaggtggacgttttacaaccggaggccgtggcggtgaaatctatcgggttactaatttggaagattatggcaaaaatgaaactcccatcaaaggaagtctgcgttatggaatcgagaagtccgaccagcctcggaatatcatctttgatgtttcgggtatcatagaactgaagcgtggattgtttttagtagatcatcccaatgtaagtatcttgggacagacagctccgggcgatggtatcacgttgaagaactataatttctcttttaatctgtcggcagacagcaaagaaatgaatgcaattattcgtttcttacgttgccgtcccggtgacaaatacgaggattatgccgaagatgctattggaggaagatatttcacgaatgcgattgtcgatcatgttactgccagttggggagttgatgaaactctgtctttctatggttgtcagaattttactgcgcagtggtgtatgtcaacagagagcttgaataattccaatcatgccaaaggagctcatgggtatggagcgatgtttagtggtgataatgcttcttaccatcatattctgatggcacatcatagtagccgtgctccccgaatttctgatatgccggaacccggaacccaaggagccggtgaccatatcggatattttgatgtacgaaacaatgtctattataactggagtgaagccggatttggctgttatggtggaaaatatggaacgttcaatattgtcaactgctattataaagcaggaccggctaccggaacaggaagtatgtcctggagagttctgtcaagtgatcctaccgccagagcatatatcgagggcaaccatgtgactgccagtgcagaagttacggcagataactggacgaatggaatctggagtcaattttggcgcgatttgcatcctacagaagaagaaatgcatgcaatgagaatggcggaaccgcagccatttagtaaggtgaccagccatacacccgagcaagcctatgaaaaggtattgcaatatgccggcgcctctttgcgcagagatattattgatcaacgtatcgtgaaagaggtcagagaaggtacttctacatggactggttcgaaggatgaaaaaccgcgccctggaattattgatacggtgggggatacagaaggatatcctgaagttaaatcgttgaaagcctggccagatacggatggcgatggaattcctgatatttgggaagaagcttacggacttgatccgaataatccggatgatgctgcacagataagtacgtcagtagatcccaacgggcgttattccaatctggaagtttattttcataacctggttcagcatattgtttacaatcagaatctgggcggtcaggttatcgagaagaaatagtaaaccgtatattttgtaacaaaaaactttagtataatgaataaactaattataagtatattcaccctgttattggtggcggtcagtggttttgcacagaccgtaaccggtacggtgacagataactacgggccggtaataggtgccgcagtaatggtgcaaggcacaaaaataggtactactaccgatatggacggaaactttacactgaccaatgttcctgatgtgaataaagctgtgttgactatccgttatgtcggaatgaatgaagtgaaagaaccgttgaaaggacgtacttccggaattcatattcagatgacggaagccgtcggacaactggatgatgtggtcgtaatcggttatggtacacagaaaagaggaaatctgactggttcggtatcgagtgtatcgggcaaggttctcgaaaaagtaccgactgcttccgttgcagaggctattgtcggtaaaatgccgggtgtgcaggtgacagcagtggatggttcaccggatgcggaaattaaaatattggtgcgtggtggaggttcgatcacgcaggacaacagtccgctgattttggtagacggatttgaagtggggagtttaaatgatattccaccgacagatgtagagtccatcgatgtcttgaaagatgctgcttctacggcagtttatggagctcgcggtgctaatggtgtcattctggtgactaccaaacaagcaaaggaaggacgcgtatctatcaatttgaatacttacttgcagacaagcacattatcaaacaagctggacgtgatggatccctacgaatatgttttgatgcaatatgagaatgcccgtcaaaagaattccatacccgacgatttctttaataagtatggacaagcatatgaattctatatttatcagggagataaaggaacggactggcaggatgaaatttttggaacgaatccggtatctaaatatgtagaccttagtatcaatggcggtacagagaaaacgaagtataaagtggcatttatccatcaagaccgtcctagtgtgatggtggggaacgggttgaaacagaacaacctgaatgtgagtctgaatacccagctctttaaattcctgacttttgaataccgcacccgtttgttgcataaagaagtggacggttccggtacggatggggtgagtcttttggatgcactccgtcaggcacctactgaaggattggatgaatatatgaaattgccggaagatgatacttattatgaccctgatttattggatgagataacccgctttaacccgaaagaagaatctgaaaagaattataagaaaagaattaataagtctctcaatacgataggtgctctgacttggaatataatgaaaggcatgactttccgtacggaattcggctttgaaaataatgcagaggagtctcgacgtttttggggcactgatacatctaacgccaagaataataataaccagccaatggctgagtggagtatgtctcaaggttccaaatggcaattatccaatgtgtttaactacaactttatgttggatgatacgcatgatatccaattgatggtcggacaagaaatgaagagttcccaatccagccgtaagacctatactacccgctattttccggtgaatacaactgcggaaaaggcatttgataacctgtctttgggtactccttacgaaaataagtcttctgccggttcgcccacacgcatttcttcttttttcggtcgtgcttactatggatataaggataaatatctcgctactgtgaccttgcgtgccgatggttcatcgaagtttgcttcaggcaatcgttggggatttttcccggcagcggctgttgcatggcgtatgtctaatgaggactttttgaaagagagtgaagtggtgtcgaatcttaaattgagagtaagttatggtgcttctggaaatgaccgtatctcttccgatatttatcagaaattgtatggtatcagcagcagccggcctgcgggttgggaagaaacgagccggtactattatcaattttataacacgaaagaactgtataatccccatgtaaaatgggagactaccattacccgtaaccttgccgttgacttcggctttttcagagaacggttaagcggatcattggaattctattggaacacggtgaaagacttactgctttcttctactattcccggctatacaggctacacacatcttatggagaatgtggggcagacttcaaaccgaggggttgagttgtctctgaccggttatatcatggaccgtccggactttacattgaacgcgacgtttaatatcggtcgtaataaaaacaagatcgacaaactggcaaggggtgaaaaggaaatggtgctttcttctggctgggctggctctcaactcttgaattcagatgattatcgtgcctacgtaggaggtactaccggtttgatctatggatttgtgaatgacggtttctatacagtggatgatttcaagccatttgattcaaaatccagaacatggacattgaaagacggagtcgtaaactccagcccgttgtccggtgacccgcgtccgggtaatgccaaatttaaaaaactcactccggtggatgaaaatagtgccaacccgtatacgttgacggatgacgaccgtactgtgatcggtaatactactccgaagttttcgggaggatttggattaaatgcaacttttaaaggttttgatgtaagtgcattctttaatttcatgtatgatttcgatgtgttcaatgctaataaagtaatgatgactacatgggcaagcaataattacaacaatttcagtatggatatttctgctgcgaagcgttggcgtaattttgacgatatgggtaatgaaattcgttacagtccggaaattcttgcagagtttaataagaatgcgacgatgtggaatccgacttctatcggacgtcccattgcaatgtcatatgcagtggaagacggttctttcctgcgtctcaatacggctactatcggctatacactgccacgtgcatggaccaataaagtgggtttgagcagagtacgtttctatgcgtcaggttacaacctctttacgattaccggatatagcggttatgatccggaggtagatattgctaccggattaacgccgaatatcgataataacagatatccgagaagccgcacatacacgttcggtgtgcaattgaccttttaataaactaactaaaatgaaagaacaatgaataagaagttattatattcaaccatagcctgcgcgatgctctctttcacatcttgtaatgactttctggatgtggagcctccttcaggatttacccccggatatgtttttacttcagaagaggaagccaaagccttgatgactaaaatgtattctgcaatgacagaagacggtatgtatggcagtacgcttgccaacagcctgaatacgaatacggatgtagaaatgtcttcctttaagaataataccgtagcggccaccggtgcggatatcggttgtttcgattccaaaccctactggaatacgttgaatagtacatggaacaatatgtattccgtgatcaattatgcgaacgacttcctgcatgaaatggaaaattcctctttgttctccttacagataaaagaggagggaccgactgaaatacaacagatgtacggagaggtgaaaacacttcgtgcgatgctttatctggatttgattcgtacatggggagatgtcgtctttgtgaccgaaccttcgaaatccacagatgatttcttttcagtcggtgtgacggaacggaacaagatactggaatacctgattgacgagttgattgatgtagagccgatgatgaaatatgccgccgatctggattacggggtagagcgtgcttcccgcgaatattgccaggcacttatcggacaactggctttgtatcgtggaggatggtctttacgtcccgataaagagaatccggacaacgtgggatatatggaacgtggtgacaatttcgagcattattatgatatcgctatcacctatctgggtaaagtaatcaaggaaaacaagcatgatttgaaacagagttacgaagaactttggtacaatgaatgcaattggacgacggcgaataatgacgatgtgatttttgctatccctatgctgaaaagtgtgaccagccgttacgggtataatgtaggtgtaacgattgccggtgacaagcacgagtacggaagtgccagcaattatctgcattattgtggtacgtatatgtttacatttgatggggatgatttgcgtcgtgacgttacgtgtgctccttacaaatacgataagaacctgaatcaggagatggatatgggaatcgccggcatgggagtaggtaaatggtcgaaacttaaaatgaagtctccgttaggctcttccagtggtgcgggaacgggtatcaatagcatacgcatgaggtttgcagatgtgttgttgatgtatgctgaagcggtgaacgagcggttcggaccgcgtgatgatgcaaaggaagcgatgaagagggtaaggcggcgtgcgtttgattcttctttgtgggcttcgaaagtagaatcttacgtagaaagcctgaatagtgaagacgatttcttcaaagcaatcatggacgaacgaaaatgggaatttgggggtgaaagtatccgtaaatatgacttggcccgttggaataagtacagtgaggtgatctataatctctattttgaaatgattaattgggggttggttgccaatggtacctatataccgggtattgataaagtacctgaaaatatttattataagtcagtccctgatccggaacatccggacagaaccattctggatatagtcggcattgagaaagaagaattcggaacgggtaaacctgccggttatcaaacgttggcatacgctattggatggagagtcctgaactcggaaacgcagcaatttgagaccttgaaagagatttcctggagtttcagaggatttatcaatctgaataacgacaagagtgtgaaaccttctgatccgttgagatatttgtgtccttatccttcacaagtaattacagaccatagaggggctattcaaaactattatggatattaaccagtaaaaatgaatgttatgatgaagttactatatagattgacaacagtcttattgcctgctttgttgtggggagcgcttttcacaagttgccaagacgaccaatataacaaaatagacgatctgtttcagcccagattcgtattggagaaaccggaggtgaagagtaattctattactttggtgtggtataaagtaaatgatgcatcatcctatacggtagagttgcatcaggatacgtattacaaaagtttgtttatgtcggtagatacaactgaaccatttgtctttctggacgatatcccttatggaacaacgttctatattcgtgtgcgttcgaatgcggcaaatgcagtcaataattctcaatggacttatacgaatgcttctacagaggccagaccggaatatgcgaagttattggaagacgtatcaaaaacagagataacagaaaactctgctatcattcgttggaaagtagatgtacagaatccggtggacagtatcagcgtgatgccgatgatggacaaaactttagcgaatgtatcccgttatctgactgaagaggaaaaagcacagggacgtgccgaagtgactggtctggataagaatacactgtatgcggttaatatttacgatacaagtaagccgaggaaatatgacaaaccttataatcaggctactttccgtacagcgggaccggctgccgaatctattacggtaggttgggatgatgatttgacgaaacttctgactgataataatgataatgcggagattccggagggtaccgaatatttcttgccggctggctcttcttatcgtttgagtccatttgcaataaagaaaggtttccgtctggtcggtagcacggaaggcattaagcctattgtcactatggaatcttcatggaatgtggttgccggatcttatatttccggtatagagtttgtaaatgttgaattccggcaggagatattgaacagttatttctttaatagtggtaatgcatacacgctggagaatatcagtttcgttaattgcgacttctatggattcggacgtggattctggcgtcatcagggagctaacaataaacatctgatgaacttcgaaatggaaggctgcaagtttgaacaatgcggttggcagacaggtgcatacggtacgttccatcttggatcgaccgataaggaaggtaactcttatgatcatctggaaagagttattttcaggaactgcacatttagtagagataacaacagtacagacggctggggctggggtaacatcttctatgcgcccaatctggacaaacctattcatctggaatataaaaatgtaaccttctacagcttctgtcgcaatcagcgtatgattaatatacagtctgctgttggttcggaattggtgttggaaggagtagtcttggcttcaccgtgtggtgaaatttattcaatcggtgccaatactaccactagcttctctaacaattatacaacgaaagattatgcgttgggtggtagtaagatcaatgcaaccgatttggatatgactgctgccgaactgtttgttgacccggaaaagggcgatctgacaatcaaggattcgaattctccgattgtcactaatcgttccggtgatactcgttggattccataaccggatcattgtcaggaccatactggttatgaacaggtaatcgtttttctgaaaacaaatggcccttgggaaaagaaaccgggggctgttttttcctctatataaaatttacacaattgaagtatgaagaagatacaatgcattttacagggagtcatcttgctgttctccttgtgttccccagtctggggtgctgatgggagggggcttatagataggaatcattccggtgaaagtaattctccttttcaggctgtagtggcaagagatggcagtggtgattacagaacggtgcaagaggctgtaaatgccgcacccgaaaattcaaaaacaccttggtgcatatttgtgaagaatgggtcttatcgagagtacctatttataccaaagacaaaaacattcattcatttgataggacaggacaaagataaaaccatcattcaccacagtctgaatgtgggtggcaaaccagaggctacttcgacagatatcgactattggagatattctgttcataatccggaatcggatgtctataaatacgatggtagtgtagtgaagattgaagcgcctgatttctattcggaaaacatctcttatgttaacgactggggagtggatagccagaaagggccgcaagctttggcaatgagcagtcaggcggatcgtatcgcatttaataattgtaacttccgttcttttcaggatacatggatgactacaggcaatgatactgcacgacattacgtcaaagattgttggattgaaggagcggtagattatttctatggcggaggaaatgtattggcggaaaattgtactttctataatactcgtagcggtgctattattgtagctccttgtcataaggaagcgaaatgggggtatgttttcagagactgcacgatagatggtaacgaagcggcggctaatgttaagaagtggggggtgaaactgggacgtccgtggcataattcgccaaaaacggtttatattcacactactatgaacattcccatttctcctgaaggttgggcaaatatgggtgcgatccctactttgtttgccgaatataacagtcgggatgccgcgggtaatgtcctgcaactggatcagcgtaagacggaatatgagggacgtggtgaaaatgctccgaaaggaaccagtcgtgcggtgataacggcagaagaggctgctacttatacttatgagaatataattcccggaacagatcagtggaatccccgtatgatgatgaaaaaacttcctgctcccgaggggcttaaaataaaggaccggagactggagtggaaaagtgtgaaggatgcgacggggtatattgttttcagtggggacagggtagtaggtatgacacgtggaatgtatctaactcttcctcaatatccggtgatgatattgcaggtttgtgctgtgaatcagtatggttctttgggaaataaggcgattctttcccgttgaaaataaatagtatatttcaataggttttgatacataataaagataagtatgaatagatttttgaaaaaggatttcagagtaatgctggtgggactcttgttattggcatcttgtcaggcatattcagactcggaggataaaacgatagaaatggaagatttatataaagaccttcctttctccatgcccgccatagagcgtcccgtcttccccgattatcaggtgaatatttgcgatttcggagcaaaaagtaatggcgtgacgttgaatacggaggctattaataatgcaatcaaagcggtgcatgataagggaggtggcaaggtagtcattccggaaggcttgtggttgacaggacctattgttttgcagagtaacgtcaatttgcatgcggaaaagaatgcgttgattgtatttagtagtgatacttcattatatccgatcatcaccacttcgtttgagggactggatgtcaaacgttgccagtcgcctatctcggcaatgaatgcggagaacatagccatcaccggttatggtgtttttgatggggcgggggatagatggcgtcctgtgaagaaggataagatgacggacaggcaatggaagaatctggtgaactccggcggcaaggtggatgagaacggaaaggtgtggtatcctaatgaaggagcgctgaaagcctctgttctcatggccggcagcgaagataaacggactgaaatcacgagtgaagaatgggaagatatgaagagttggttgcgtcccgtattgctaagtatcgtgaagagcaaaaagattcttctggaaggtgtgaccttcaaaaactctccgagttggtgtctgcatcccttgtcgtgcgaatctttgatattgaatgatgtaaaagtattcaatccctggtattcgcaaaacggtgacgcgctggatgtggaatcatgcaagaatgtattgattgccaactgtttttttgatgcgggggatgatgctatctgtctgaagtcgggcaaagacgaggatggccgcagaaggggcgaaccttgtgagaatgtgattgtgagaaacaacaccgttttacatgggcatggcggattcgtgattggcagtgagatgtccggtggtgtgaagaatgtgtatgtgtctgaatgttcttttatcggtacggatgtcggcttacggtttaaaagtgcccgtggacgcggtggtgttgtggagaatatttatatcaataatataaatatgattgatattcctaatgatgctttgattgccgacttgtattacgcggtcaaaagtgctcccggtgaaccggttccgagtgtgagtgaggagacgcctgctttcagaaacatctatatctcggatgtgttttgcaggggagcaggacgggcagcttatctgaacggacttcccgaaatgccgattgagaatatttccatcaagaatatggtggttacaggtgctaaagagggtattgtagtgaataaagtggcaaagctcaacattgagaatgtggaaattgacactcccgatcaatctatgatacagatagaaaatacgacggatatcaccattaacggaaaagagttgggaacgatttcggagaagcggttgctgaccaagaactaactgtatcatctgtttttatactgtttttattgtcaatctgtcagagcggcagttaaagaaatgaattacagtataatacatgctgacaatagaagctgacaatagaagctgacaataggctgacaataagaattaagtattctattgtcagcctgttttttattgtttggcaagtaaggatacaagtctgtccattcgtacattatagcattgataggctgatgaggctatatcaatatgcctatatcgttcattgatactctcatatctttattaatataccgatatagttatgctggcatcttggaattattgtttcaaggttttgatgtagttgcattaatatgcctgtacagttgagtaagtatgtctgtatcgtttggttagtgtgcctgtatagttgagttagtgtgcctgcatagttgggcaaaggtgccgttatctttaccttcccacggtcgtggtaacatcttctcacggccgtgggaagatcctaccacagccgtggagagatctcgtcacggccgtggagaattagcaagatcggtgctttagtggaacaatagcggcaccctggttgaacaataacggtatcttagcggaataatgcaggcttggtaaataagggataatagttgcatagtgtagttttaaacaataataggctgacaataaaagacggaaatctttattgtcagcctattgtcagtttctattgtcagtgggtaatagcttgaaaacaatcactttatgaagccctaactcttggcctgacaataaaagccattttttataaattctcaatgtagcctaagttcaacttagcctcaaattatatatgaaacggtattacctattgaatctgaatactgcacgtttgcaagtctttttcatttgaactgtttccgtaaagtatcttatatgttccgtttaaaggacgtatggtattggtcgctgcatcaaaccattcgaaagaatcgtacggaagctctatctggacgttctgtgtcttacctttagcaatgctaacccgttggaaaccacgaagagttttttgcggaccttctttgtcgtcaggacggcagatgtacacttgaaccacttcttcaccgtctctctgcccgacgttacttaccgggatagtaaggattgctttttcgcctttggtcagcttcgattggttcagggtagctttcccataagagaaacgggtataacttaaaccgtagccgaatggataaagaggtgtttccgtcatgaaacggtaggtacgtcctttcatcgaataatcttcataatccggtaattgttgcatgcttttatagaaagtgataggcagacgtccggcaggattgtaatctccgaaaagaacatcggcaacggctgttccacctgcctgtccgggataccatgcttgcaggatagcatcgcaattctgcgtttcaggcacgatggccattgccgaaccggagaagttgacgaatactgttttctttccattcttctttagaagagcaagaacttcgcgctggatggcgggcaattcgatttctgtacggtcgccgcctttgaatccggggtcggatacccgcatggattctccttccaataggggggagatacctccggcaaaaataactacatctgcgctttgcaacttgttcaggatttcacgggcatccattggagtttgttttgccaagtcgaagttcagtgcagggttatctttaacctgaataaaacgcaactcgatgtcgtaactctttcctgcttcgtagttgaaagaatacagattggtatgattcttgatgttggtggcttctgctatttgcttgccgttgaggaataaagtaactcctccgttagtcatcacgcggaaagtggcggcaccggaatctgttgggcggaaagtggaacgatagatggcggtgaagtttttcaatcctacaccgggagcaaatacggtagaaccttctgcactgaaatggaaaggagtggtcagacggtcggttgcggcaattttgcctttatattcgcggttattccagtaggtggcgttgaatccggcttctccgtcgatgctgcactgattgaataggctgtgcagggtggtgtcgtttgtatatccgcatacaggttcgtagatgatttgtgcgtcaggtagtttggcgcgtattccttccagtagagtaacggtatgtgaagggaagccgttgtagttcccccattgcattaccgagtcgttggcgttggggccgatgactgcgactttcatctgacggtttaatggaaggatgttgttattgttttggagtaataccagactttcatgtgccattttcagtgccagttctttgtgtttgggacagtcgataacagaaaatggaatgttactccagggatgagtcgaattcatttctcccagttcaaagcgggctttcagtactcttttgactgatgtattgattttctcttccgaaatcaggtcttttttcacagcatcggtgatgcttttgaagttaccgccacattcgagatctgttccgcttaaaacagcgtcggcagaggcatgggcggcatcgggatgcgtttcatgtttcttgcgttggaaaaagtctccgattgctccgcagtcggtgactacgattcctttgaatccccagtcgttgcggagaatttgggttaacagacggttgctaccgcagcagggatcgccttcgaaacggttgtaagcgcacatcacttctttgactcctgctttttgtaccagttccttgaaagcaggaaggtaggtttcccataagtctctgggtgcaatgttttctgcgttgaagctgtgacggttccattcgggacccgagtgtacggcaaagtgtttggcgcaggcatgaagtttgtcatattcggcatcttccggtccttgcagacctctgactgctgccattcccatacgcccgcttaaataagggtcttcaccgtatgtttcctgtccccgtccccagcgggggtcgcggaagatattgacgttgggagtccacatggtcagtccctgataacgtttatattgtcctttttcattgaattggcggttcttggcgcgtgcttcgtcggatacggcatcaaatacttcgtataatagttcgtcgttgaaagaagcggccatacctatggcttgcggaaagacagtagccagtccggcgcgggcaacgccatgaagagcttcgttccaccattcatacggcttaatgccaagccggggaatagccggtgagttgttttgcatcaacgccactttttcttctaatgtgaggcgttgaagtaaatcatccgcccgttgttccacagtcagcttcgtgtcctgatagggatacttgctgggttgttgtgcctgtacatttaccccttgaattccgataagacaggcaatgatccattgctttttcattttctagtttttttggtttttagatttgagactgcaatagtacgcgcttttcattatttttgtggggaatatccggtagaaaaggaggatttcctatgcaaggcttatttggagccgataaatccatagacctgttcaaagataaaacattttgttgaatatagcataagctttgcaatgtaaatagatgataccgaaatgttgttttgatacttatatcagagatatgtcttgttgaaatttgagtatttaagagataattatagctggattacagatatttactacatttgcgaacgactggtagttcttctggttgtgtatagaatatccttttggtacattgtacgttggggatattctcgtttgtataagaaataatcgtaaataatgaatattggaggacataaatgaatagtgattataaagttggcgatttaatttatgatgcaaatatttatgatggaatgaataccagcatggatgatttgcaattttataagcggtggttacctaaaaacaaggatgcccgaatacttgagctttgctgtggaactggcagacttactcttcctattgcaaaggatggatatgatataagtggggttgattacactgcttcaatgctccatcaggctaagatgaaagctgccgaggctggactaagaatcaatttcattcaggcggatatcaggactctggatttacagaagaagtacgaccttatttttattccatttaattcgatccatcatttatatgagaatgaagatttatttaaggtacttcatgtcgttaaaaatcacctcaaagacggaggcttatttctgttggattgttttaatccgaatattcggtatatagttgaaggtgagaaagagcagcaggaaatagccacgtatacaactggcgatggaagagaagtctcgataaagcagacaatgcgatatgaaaataaaacccagattaatcggatcgaatggcattattttatcaatggtgaattcaattctattcaaaatctggatatgagaatgtttttccctcaagagttggattcatatttggaatggaatggttttagtattattcataaatatggaggatttgaagaagaaatatttaatgatgattcggaaaaacaggtgtttgtttgtcaatgtaagtttggatattgatgtgttgttgacaggcaaatctctttatcttgtatgaaaagtccctttatatcagtttactctatcgaatttcgattgatcgaataatgagacaactgggtataaagggactttttatatgcttatcaaagagttatttttttctctctttgtattctgacggggtaattcctatcactttcttgaagcacttgctgaaatatttcggatcgttgaaccccgtcatatatgctacctgggagaagttatattcgtcgctgtcaatcagttgtacggcacgtttgatacgtatttcccgtataaagtcaacaggtgtcagtccgacgattgattttaatttccggtagaagattgtacggctaagcatcaactgttctgcaaattcgtcaatcgttagttcggcattgtccatctgttcttccatgtatgccattacttttttcataaattgctcgtcgtatggagtaatctgtggttgtgaaggagtcagaggatcgggagaagaggtattctttccttccatcagcctattcatatagagctcctgcaatgctttgcgttgtcgtaacaaggaggctacacgggtctttagataagtagcactgaaaggtttggtgatataatcgtcaatgccttgttccaatccggcgatacggtcgtccagagaggctttggctgataatacaatgatggggatatggcaaatattgttgttctctttgatttgcctaatcatttctaaaccgtccatcaccggcatcataacatcgctgataataagatcgggcaggtcgtcaacagcatgttgcaatccctcttcaccattggaagctgtgattaccgtataattctccgacaaaatacttttcagaaaagcctttaactcttcattatcttctaccaccaatatggagaaaccatccgaattagtctcaaggtcttctttttcttccacctcttctggcgctttcatgctatcgacgggatgaggtgctgaactctgactatcattcaggataaattcgacttgtacatcctcttcgaaaatttcccgttgtaaaggcaagcttactgtaaaacggctgcctattccgggttgactatttactgtaatagtgccatgatgcatttccaccatctctttcacgagagacagcccgatgccggaagatggttgcagaatattctgttttaccaatgactcgaagcgttggaacaaggaatgttgcttttctactgcaattccgattccttcgtctgcaacctctatctctaccgtcttctctttcgttgtgatattgactgtaatcgacttgtcggcaggtgtatatttgaatgcattggaaagcagattgaagaatatcttttcaaacttatctctatccacccagctatataccgactggatggtagaagtcagctgatagtttatgttcttttcttcagctatcagtttgaagctactcatcaccttttgcaaaagtgggatcaaatcggtctcttcaatcagcagtttcattttctgattctgaatcttgcggaaatccagaatctgattcatcagtcggagcatgcgctctgtgttctgatgtaccaaagtcaaatgctcacgggcggaaggagaaagcggttcattctctaatacctctgtcacagggctactgattaaagttagcggagtacgtaactcatgagatatgtcagtaaagaatcgcagtttgatatttgctaattgttgttccatatccactctgtgacgtaaccggtagatgtaaaataatacatatacgatgcttgccgtaaagagtatgaatagaatgaaatagaacagccatgcccagtaggtttcccaaaaggtggggagtacatgtatagatagagtctgtacattgtccacccagaccccgtcactgtttgttgactttacctgcaactgatatttgcctgcaggcaagttgatgtagctagcggaacggttattatctgcttcattccattcttcttctagtccttgcaggcgataggcatataaaatcccttttggattgacataatcaagtgcagcaaactggaaagttacattcctttgagagggctccagttccaattcttccagattgtcaatggagtgatcggtaaggtgtccttgaatcttgagtcctgtaaacacaataggaggaacatagctactcttccgcatcttctccggagaaacttccagaaagcctttatcagttcctaagataatctggttgcgggcattgataataggaagagcttcggagaaattgaattcctgatagatggaacttaattcatagttctcaaaagtttctttggctggatcgaatttggagagcgcaatctccgaaacaacccatagttggttctgtgtatcttcaatcattgatagtgccagatcggaagccagcccgttgttcttgtcgtagtttttgaattggatattctcgttcagcagattgggagatatcactttatttactcctccggtaaagctgacaacataagtcgttttattcttgtccgtatagatatgcatgatatcgttggcactaagactgtttttatctcccggtctacggatattccggtagaatttaatctcttccaggcgttcgaagttgttcgagaatgtcagcagtccgttagttgttcccactaaaatcactcctcccggagcttctgcaatattgcgtactttcataccgtaagctatgggatagtttcttaactcattattactatgaataaatgaaacttttccatctttagcttgtgccagcagatttaatccgcccccataacatcctatccaaatattattacgactgtcctgaaagatagcataaatgctattactgcttaaactataaggatcatttgtctggtgttcaaaatggtgaatagagtaatgatttgctcctgtctttttaagttggaaaagtccgatttctttagtccccaaccatatatttccatctttgtcttccagaattgaatataccccattataaaacgattgtttttccttaatgatatttccttgtttggataagtaccccaccaggttaccatccggtgcgaatatctggatataattagattttgatgctgtccatagacgtttattgctgtcttgcaggaatgcacgtgtttctgcctcgtaatcagtcaggttaaattgatagctctgtgggaagaagcatagtttctctacaccacgtgctgttgcaaaccaacagtttccctgattatccaatgtataagacctgactaacggactgaaaatagacttaggattattgatatccgtaagaagcggtttgagagttctttccggtcatagtagcaaaagtttccttccgtggggagtaaccataggtttttcgcattgtcttcaaaaataagtttacgacttttacgcccatgcttgataatctcatctttgggggtgaacagatgttctttttcattggtcgcgaggttaagatgaacaatgcccggatcttttgaaaaaatccagatatctcccaagtggtcttgatagacagattctacatcgttggaagtttgggtagctgtacggatgtctatttgctggaaactgttcttcgggatagaatacaaaatcactccattatccgttcccaatgccagcatatcttttcctatggtagtgacattgtttattttatgatgcggataaggaatatctacgaatttcagttttttagtgtggaagtcatatctggctaacttgtcattttctgcaatcagacagatcgtttcctttatttgggtgatgaactggaaaggaaagtctgtatccagtgttttctttcctatgatggaaacacctttatccgtcaatatccattcatcttcttcagagtcttgataaatgttaaatatttgatttcctttcaggttgtggttggaagctgaataaagtgtgatgccttctccttttttgcataattgttcgtccactctgaatgcatatccgctttcacagagaatccaggcaatccctttctccagtgaataaatgcgtgtaacattgttagtttgtttcgtggaaagttcaataggttggagaacatcaataaacttctcggtttccacatcaaaaaggcaggcttgtccatcgtaagtggggcaccatatatctccgtatttgctttctgaaatagttcccatgcgattactgccgaatgcatatttactctcttgcgaagttttatatgtcttaaaagtgtatccgtcaaacttgttaagcccgttccaggtactaaaccaaacaagccctttctgatcctgtaaaatgctcattacattaccttgagcgagaccgtcactcacggagaaatgtttaacttggcagataggttgagcagctatattgatcgctattgttagaagaagaaataaagtatggagccgtttcatagtagttactttaatgtttatagcaaaaataaacaaaacaatgcagaatggaaagtccgataagtggtttgaacgaataatactcgttttttcctattttttcctcttcatcctatacagcattgatctctatgttgtgttttgaacaaaaataagagagtaatattagttaaaaaaatcctctttataatctgaataagattataaagaggataattttattgacaagagttgcatggggtatggtgagatgaaatcataattggggaataaattgcacaagactttcacaagtatcctcctgccaatgcctaaaatcatagcaaagctaattaaatagtttttcgaattgcaatatttattaatttatcttatggtatttatgaaatttttaatatattgaagaaattttgtgccaactttccgtaactcgttgattttgcttatgtttgtaggtaaaataaagaatgaagtgaatgaatatgtctacacagctattatataatgatttccctacttttttacggaaatattttccttacaaagtacaaaagatttcattgaatgcaggtttcacttgccccaatcgtgatggtacaaaaggatggggtggatgtacttactgcaataaccagacttttaatccggattattgtcggacagagaaatctattgcaattcaattggaagaaggtaaatgcttttttgcccataaatatccggaaatgaaatatttggcctattttcaggcctacaccaatacatatgcggagttggaaggcttgaagcgtaagtatgaggaagcattggcggtggatggggtagtcgggctggtgattggtacgcgtcccgattgtatgccggaaagtttgttgcgttatctggaagatttgaacaaacatacgtttctcatggtagaatatgggatcgaaagcacttgtgatgaaaccttaaaacgcatcaatcgggggcatacttatgcagatacagtagaagctgtgtgtcagacagcggcctgtggtatcctgacaggtggacatatcatcctcggacttccgggagaaacacatgatacaatggtggcacatgccgaaattctttccgatctgcctttagctacacttaaaatccatcagttacagttgatccgtggtacgcgaatggcgcatgagtatgacgtaactcctgctggctttcatttgtttaacgaggttgaggaatatattgatctggtgattgattatgtagaacatctccgtcccgatatggttgtggaacgttttgtttcccaatctcctaaagatttattaatagctccggactggggattgaaaaattatgaatttgtagctcgtttacaaaaaagaatgaaagaaagaggtgcttatcaaggtaagaagtatagggattcggaaaaaaggattatttttgcaaacgataaacttaccacttaataaatagctgttttgcggagtatagaatagtggaagaaatgtttaatggatttgaaagatggaaagtaaaacaagaattaaaggaaatgtccactatgtgggagtaaatgaccgtaacaagcacagatttgaagcgatgtggccattgccctatggagtttcatataactcttatctgattgatgatgaaatggtggcattggtagatacggtagatatctgttattttgaagtctacttgcgtaaaatcaagcaagtgattggagaacgtcccattaattatttgattataaatcacatggaaccggatcattcgggatctatccgattgattaaacaacattatccggaaattattatcgtgggtaataagcaaacattcggtatgattgaaggtttctatggggtaaccggtgaacaatatctggtaaaggacggtgatttcctcgctttaggacgtcacaaactgcgtttttatatgactccaatggtgcattggccggaaacgatgatgacttttgatgaaacggatggagttcttttctccggtgacggattcggatgttttggtactgtagatggcggattcctggatacccggatcaatgtcgataagtactggggagaaatggttcgttactactctaatatcgttggtaaatacggaagccccgtgcaaagggctttgcagaaattaggtggacttcccatttctgccatttgttctactcacggacctgtatggacagagaatattgcaaaggtgatcggcatatatgatcgtttgagtcgttatgatgcggatgaaggtgttgttattgcctacggaagcatgtatggaaatacagagcagatggcggaagctattgctgaagagctttctgcacagggggttaagaatatcgttatgcataacgtaacaaagagtcatccttcttatatcatagcggatattttccgttataagggattgattatcggttctcctacgtatagtaatcagatatttccggaggtggaagcgctgctttcaaagattctgctgcgtgaggtgaagggacgctatttgggttacttcggttcttttgcatgggcaggtgctgcggtgaaacgtctggcggagtttgctgaaaagagtaaattcgaattgatcggtgatccggtggagatgaagcaggctatgaaagacctgacttatacccagtgcgaaaatctggcacgtgccatggcggaccgtttgaagaaagatcgttaaaacagtgaatgagataatttattaactaacctataaaataatcgacttatgagacttattattcagccggactaccagtccgtatctctgtgggctgcacattacgttgccgctaaaataaaagctgccaatccaacccccgagaaaccatttgtattgggctgtcccaccggatcatctcctctgggcatgtataaagctttgatcgacctgaataagaaaggaatcgtttccttccagaatgtggtaacattcaacatggacgaatatgtaggattgccgaaagaacatccggaaagctattattctttcatgtggaataactttttcggtcatatcgacattaaacccgagaatactaatattctgaatggtaacgctccggatctggatgcagaatgtgcacgttacgaagaaaagatcaagtcatacggtggcatcgacctgttcatgggtggtattggtcctgacggacatattgcattcaacgaaccgggatcttcattgacttcacgcactcgtcagaaaacgttaacaatggataccatcattgctaactcccgtttctttgataatgacatcaacaaagttcctaagacttctttgacagtgggagtaggtactgtgctttctgcaaaagaagtgatgattattgtaaatggtcataacaaagctcgtgctttgtatcatgcggtagaaggtgctatcacacagatgtggacaatcagtgcattgcaaatgcatgaaaagggtattatcgtttgtgatgatgctgctacagctgaattgaaagtgggtacttaccgttacttcaaagatatcgaatctgctcatttggatccagaatcattgattaagtaatttgtgatgaaataatagaaataagggctgcgcactgaaaatgtgacgcagcccttttaatttctgatactattatgtgaagattagattttggatgattgtctaacgagcaagtattttggctatttctgttgctgctactttatatccttcaccagtgaaatgaatgtaatcatttccataaagtccgtctttcatagttccgtccgcttcggtgaaccatttggtgggattgatatattcaactttctcgaatcggtgatgttgtaatatgtcatgaatcttatcacattgtgtgcgcactttactctgttgttccttaccggatggaaacagacctaaaagaatgatacgtgattcggggaattgcttccgtacttcattggctactgcgataattccttcagccgtgttttcaggactgtcttttccacttatcagattattaattccaatggcaatcactatgttttcagggtggcaactattgtagttatcataacggacacgccaaagcaggttttgcgtgcggtcgccggatatgccggcactttcccaattatcctttcctatggcattgtccatagcctctttgccgggcttgtaagtcacttcttttctgttacctccccaaccttgtgtgatggaatttcccaataacaacagttttaaatgtttcccattgagagtggcggttatgtcttttgctacgctgttccagtccgagttttgggtccatccggctgccgaacggaattcatttcccggtacaggatgcacacgcatattttccgccctgttcgtagctttgaggatgaactgcacaataggctcgggattgttgagggagtgcgggtgatgatccactccaggcttatgaataatagtaattggtgcatgcaattcctccatacgttgttcgaaaatggctgtgttttcagcaaccgacaccacttgatcagcatcacctaccacgtgcaggatggggattccagcttttgccattgtcggtgcacagtctatcggattctttttccagttcaacgcttcagcttcgtttttaaaaccgtaagcattgagaagttgtttcgtatccatggcggaaccggcagatttaccttgtcccataggccaacttttgaagtccattacgggggcatctgcataaatacatgccactttttccgggttttgtgccgcccagttatagacaatcagcccgccacgactcatcccttcaagtgccactttcttgttgaatccggctttcaccattcgcttgtaaaaactattccagcgttgaacagctttatccgagccatataagtcggctacatcacagtaaacaatatgaaagccatgttccaataatgctatgtcagtctgtggctcatgcccccaaaagcgtgcacgaatcatccaaggttttcctatggcttcttttgcgggctctactacaaggcattttactccctcattctcaaattcatacccttggtgtccatggaagttgaatcgtttggcatcttgtattcccagtgatgtctgcagctttgttggagaagctgttgcttttacagcgagatatttatatatcttttgggccatgactcctgctccgatagaagaggggtgcagtttgtccggtagcataaccgaatcccactggtcgccgaagagattaaacagattgataatttccagttgatttttccaggccaattcttccaccgtggggcgtacctcgttttctatcagttgtgcattgatttccgaaccctccggcaggaaacaacggataggagtcaggagaataatacgtggatgtgatttcagattctggtatgtgtcaattaatgtctggtaattgtctttgaattcgtttttgtatttccagttttgcggtttggtatcgttagtacctaatttgattaatacaatatcgggctgatattccagagatgctttgtaggtatctgtttcggaatatgggtaatctcctttagacaatatagttcgaccagaggctccgaagtttttgacctcatacccatctcccagataagcttgaagttgtgccggatagcagttcatttcccggttggggatgaatgttccataagtaatactgtttcctatgcacgctacccgtatgggttcacttgcaaatgattggatagtaatgaatagacatacaagaaagatgccgatgtgatttaattttttcatgatgaatatgatgattttggtttgttggggggataaccaatcgttgttttgctgtgtataaacgaactggcatgctactaataataaaacttatttattcacgttcctatcatatagcataccagttcgattcatttttcggcttttatacctcttccagccagcctttcccttgccggatgatttccagttcgtcgtcggtacatttcactacagtggaaggttctatacctccgatacctccgtcaatgaccagatcgacaatgtcaccgaacttctcatctatcagttcgggatctgtcatatattccaagtcctcatgctcttcgtaaggcagagtggtcgtcataatgggagcatccagcaggcgtgcgatttcgcggattatattattatccggcatacggatacccacttctttccggttgcggaagattttgggtaaccggttggttccgttcaaaataaaggtgaatggccccggaagattatgcttcatcagcttgaatatattattgtctactttcgcatattcgctgatgctactcaagtcataacagatgatagacagattgttctttctagggtctatctctttgatccggcatatccgttctatagcacgttccttcaaaccatgacagccgatggcgtacatcgtatcagtgggatagataatcagtccgccgtcattcaggatgtcgatgattcgttgtaaatcctgcgggttattatttttgtcatatagcttcagaagcataattcattctccttctctcttatttgagtttcttttttaagaaatccagtgccttttctgctgctttctctgtcaccttttgtttgattgaatccttattggcggtagcggcagagtccagtcccagtttctgtccgagtttgctgatagcttcatcggctacagcctcgacagcttgattggccatgcttttagtatcgacgctgactttcggagaggtaaatgaacctccgatcttcaagtcaagagtcattagtttagagatattgcctacagatgccggcaacttcacttttccggagtagtcgatggtttgatcgaggcctgtgctaccggaaagattcaatgtgtagtctcccatcttgatatcgaacggtttggtttctacgcgtccgtctttgatggtgaaatccagtgtcatatctttcaccttcatgtctttcagacttggctgtttaacggcatcggctatttcgtcgattgctttcactccgcttaaactaagatcacgggtggaaaggctaccatcaccttgcattgtattcagtacagggctcatggttgcatccaaatctgtcagtacattaatacttccggagaaattacctttcaggttttcgaagataggagccatcttctgcaccatgtccaattctttgtaagcttgtgcgaaaccgatattggagagtttgaatccggctttcatttccggcttctttacgttggcagtggagtagtagccgttcatgaccacgttgccacccatggtattcatggagaggtttttcatatccactttgccatcttttaccacaagcttgccgttcatattattgaaagacatcttatcgaataacacctgtttcaggttagcgtccatttggaagtcgatgttgcggggaacttccataatacccgtggcagctgtagctacggagtcggtagacgcagtttctgatgcagtcgcttcatccgcagaagcagccatgaagtcgttcagattgaaatagttggaacgaatattcaggtttcctttcaatgtagtacctttcaatgcgtaaccgatatagttttcaaaccgactgtcggctgtgatatcattctttccgatgttgacggttgtctcgctcaactggaggtatttcggggtgaaagtgaagagagacttcttgatttctacgtccggcatatctttcattttgagtttcatacccgtcagtccgatagtacctgaagcttgcatacgttcgtattcctctttttcgatataggaaaggcgtcctgacatttgcatatcggcgtcaatggtaccgttcaactccatatctccaagtggatagacttgttttatcatacctaaattgagaatccctttagcttcagctttaaagtccggatcgctgatcggtgtttttacattagccgtcaggctaaacggatttccggcaagacggaaactgaaaggattgatattgaccgtcgtcaggtcgatatttcctcccgggttctggacgttggcactgatattgatttgatccactcctgccggtaaagccggatagcggaacatggcattcttgacttgcatatcaatgttgaatgcaggaacggtgtcgccttgcaagatacctttggccgttgcagtaagcgtagcggttccgtctgttttcagactggagaattccgttgcataaatggctggaatcagtgacaagatttccttaaacccgatatcgttcgtgttaagtttcaagtctatgtcgatagccggatctttcaaggctacccaaccgtcgatacctgcctgaatggcgttgaggcggatggtgttgtcttttaatgtgtatttgttattggcaaggtcggcatccacatccattgttgcggagatattggcattggccaggaaagggattccattcatcttgtaagtaagtgatttggtttccgcttccaacttcagagtagtgcggtcacttcctaagtctccggcgcagactgcgttaaagtcgcggatatcagcatacatctttccttgttgatcgtcataaatcaggttcatgtttttgataacaaagcgttgtagcttcactttgaaaggagaagatgcttcttcttctgaaacaggagcttcggctgttgctgttgtatccggtttcataatatcccagttggcacgtccgtccggcaatacaatggcatgtaaccgtgtatcttcaatgaatattttagaaatatcgtaaccgctatctccgaaaagagagaataagttgactgcggcagtaacttctccggcctgtacaagggtgtcgttggcaaattcaccagtaccttttaaccagaaatcctcgagagtgacagaagcctgtggaaagttacggaacaggctaatgttaaggttcttaaagtcaaattgtgcattaagcatcttgttgccttctgtttttacaatgtcggctatctttccctggaaggcgaaaggaagaaggaacatcagaatgatgatgactcctactgtgatagctgcgattttcaaaccttttttcatttgcttctattttaagagtttgagatattacaaagagcaaaactaataaaagtttttgatatagagggagaatcagttccttttctttcgtcttgatacgaaagaaaaggaaccaaaaagaaagaatcaaggctacgtttttccgactactccggtgtttcctccggctaaagggcagaaactcgctacgctcaaacagtttgccctttttaacgccggagaaaccacctgcgcttgacgtcggaaaaacgaggccgggaggccatgcgggggcactgtttgatggagatattgtgtgtaggatgatttttatgtaagtgtgtagatgacaaagatggataggtgcggaggtcgggaagaataggctattttttctttctaagttcttctgcaattctccattgtaaggcggcttctccttctttcccgactttcaacagagcgtctccgaagagttcgtgtgcaccggcatgttccggtttcaggctggtggccttgtccaggtcggcaatggcaccttctgtgttttctgtttttagccggagctttccgcggttatagacagctttaaagtttgccggatagagggtgactgcaatgttgaagcagttttcagcatcgaaatactctttgttgttgaagagagtgattcctttgcgtatccaggcatccacataattagggtcgagactaagtgccttgtcgtagttggcgagggcggcacgtgagtcgtgtgcctgggtgatacattcgttacccattaatagatattcgtgagcatattggcggaggcgttcctgctgttcgcgcatttgctctttgagtttcttattctgctctttcaaggtgtttatgacaccgagtttacgtcggataaaacggcggggaacaggtttctcaatatcatagcgggaatgaatggcgcggaaaaactgttccagacattcctccatgtctcctttgtcgaaagcgcgtgaagcagcagcgtattgcacgtcggcctgcgcttgtttcagagctttgtcgatagcctgccggtcgttgaaacgtccggcaaagtttacgatttcggggcggacgaagacgtcagcacggttaataggctttttgagctgaataccgtccagtgaggtacagcggcttagtgccacgtatgcttgtccacctgcaaatacaccacctgtgaagtcgatgactacacggctgaaagtcagtccctgactcttatggacagtgatggcccaagctaaccgaatgggatattgtgtgaagctacctaagacttcttcttctatttcttttgtcttttcgttgtagcgataacggatattgcgccatgattcacgctttacgtcacattcttttccattgtcggtgataacgtagatggtttcttcttcctcatcaattccggcaatgacaccaatggtaccgtttacccacctgcggtcgaaatcatttttaataaagatgatttgtgcaccgggtttcagtacgagctcttgtgaggtgggtagactgctttcggggaaatctccttcgatgactccttcaaaagtaattgggtctccgggaagttccgccagtttcttttcgttgatagagtctaccgtgtctctacgggtggccagagtgatatacatatcagcttccgattcttctatctggcttccataacgggtgttcagtagttgcagatcagccgctccggctgtattgttccggatatggtcgaggacgccgacaaaaacggggtctgtttggcggtataccttttgaagttcgatggataccaggtctatctggccgaatactctggcagagaaaaaatagggtgtaggatagaagcggttcaatatttcccgttcgtcgttttttacgacgggctccagttggaatacgtcgcctaccaataacagttgttttcctccgaaaggttcacgcagattgtgagagtatacacgtaggattcggtcgatggcatcaatgatatccgcccttaccattgaaatctcgtcgatgatgaccagttctatttgttccaacagcttccggtgaggcttggtgtatttgaaaaattcatggatacgaccacgctggagactcaagttcgggtcatccggcagcagcggatagaaagggagtttgaagaaactatgcatcgtacttcctccggcattgatagcagcgatgcctgtcggggcgagtacaacgtgtttctttttggtattttcgcagacgtaacgcaggaatgtagatttccctgtacccgctttcccggtcaggaaaaccgattgacgcgtatattgaatcaggttcagggcgtcctgaaacgctgcgttattggtgtctacgctcataatcagataataccaaaatgcttcattgccttgctgatgccatcctcgtcgatgggagctgtcacataatcggcagcggctttcacatcctctttggcttgtcccatggctactccgatggctgcatggcggagcatgctgatgtcatttcctccgtctccgaaagccatggtatcttcgagtttaatatcaaaatagcggattatttcatcaatgcccttttgcttggtgtctcctttggcggtcacatcggcaaatgcaggataccatcggcctatctcgcaggtaggaatagacggacggatttctttttcttcctcttccgtgataaagggtgtcatttggatgacttccttactggttgcctcctcgaaagatacagtcggaatcacattcacgtgcaggaaatcatagaatatctttttcaccatgtcattgggctggcaaacggaaatgttgtgttcctctacaaagatacagggaacgccttttttctcgcagaaatctcccatcgcttttacttcgtcctgggggatggcacttttatagattacctgttccccgacaaagcagtaagccccgttcatggtgatatatccatcaatcagattccggtcttgcaattcggagaggttgttgataatggctttcggacgtcccgtagcgataaatatcttcagtccttttgcacgggcggcttccagtgcctcaatggtagacgacgggatgcggtgagtttcaaaactgaccaatgttccgtctatatcaaaaaataatgctttcgtcataaattcttttttgaatggagtacaaaagtactatttttctatgtaaatagcaattaggagatttctcttatgctttttttaaatctctactcttatcgataggaacacaattatttaaaagtgcctaataaaatgattaattataataggttcctttattcttttgactaaaaaagtttcccaagcatggcatcaagtctttattcttctaacgaattctccttatacttctctccatagagttgctggtactccttttggaaacggtcataaacactttgtgcatacgctttttgtccaagtttcttgagtgcttttattttgaaagtcaatgccgtttcgctcattccgtcaaacgagaaaagcacgtcggacaatacgataacctttctgggttcattattcgcttctacgataggaagcagtttctcgatgatccggatgaaaagttcgtcatggttaattttgatattgccaaaccattcgtaatctacaaaagtaggcagtaaggtgcctcgttgcagcaggccgataaatcagaatcctaattattaatgggatggcaattatgcttctttctgttttaataagacgggatattgcagaacttgataaaactaacagtctgtccggatattcccttggggagatttaatcgggctttaaaaatcttgaatcaatgaaacaaataaaatatttatcctttatcccttttctagctcttctctgcttgatgacgggatgtgaaaatgacaaagatgtgtattacccttatgtcaatgttccgcttactacgcacaatccggtgctcgttgagggagaagtcctgcatatcggtattggtttggacggtgtgaattatcgtgtagagagtgataatgaggatgtggtgactgccgaggtggtcggcaacgagatactgttgacaggcggtgacataggtagcaccatcgttcgcctttcggatgatagctacaatcgtgttctcatgacggttgaagtacgtaaacttcaggaactgacactcgaatcgttcccggagggagtggaagtattgcgtctggataatgacggcgttattcttcgtgaaatgaaaatcctgaccggtaatggcggttatacagtaaccaattctgctcctgaagccatcagtgctgaaattgtggaagaccccgacgtaacaggaggatataaactgatacttggcggtaaagcaaatgtcgatcaggcaacgattactgtgacagattcccgaaacaagtcagctactcttaaagtgcgggtgacgaatccgattcgtcctgttctgtttgataaagaggggactcttgagggagaatatgtgtacgagggtacgcctcaacagatttctttcaatattacttccggtaatggcggctataccgttaaatctctgaatgaaggggtagctactgtggcaatctccggcactacagtaactgttactgtggtaggtgacggtggtacaactattactgtgaccgaccaggaaaaggaaagccgttccatagatttatgggtaccgctcaatcttgacgacccgacgccacgtatttattgggatggttatcgtgccgatattaacacggtcggagtttccagtaccggatcttatgcaacgccaaaagatatgtactggtatcaacaaaacggtgaagtgaaagatacatattatgtctactttaacggtggttgggcaaacaatttaaatagtgtgaatgctgccaaccgtaatccgaagtttgaaacgactatcaatgacactaagacttcgtatacagacaaagcagcctctgccgttaaactgaccgagtttattttggaaaaacgtatcggtacaggtccgacgagccatccgcatatctatttcatctctttaaaaacagaagatggtaagcgtggatttatagtgcatcgttggaatgaataataaagacaaataggttcttagtttttttttcagggtatgaatatgagggtcggatgctgtattgctccggccctctatgttttgatagagcatacaaaattagaggctgcctttcggtaataccacgaaaacaactatctttgctaactgtttattatacacataacctaacaatattatgcagtatgaactataattttgatgaaataataaaccgtcatggtacagattccgtaaaatgggatgcagtagagaatcgttggggacgcaatgacctgattccaatgtgggtagctgatatggatttccgcacagctccttttgtcatagaggctttgaaaaaacgcctggagcatgaagtactcggatatacatttgcttgcaaagaatggtcggagtctattattaactgggtgaaggagcgccatggttgggtgattcgtgaagagatgttgactttcactcccggtattgttcgcggcttggcttttgtgatccactgctttacgcaaaaaggagataagataatggtaatgccccctgtttatcatcctttctttttagtcactcaaaagaatgaacgtgaagtggtattcagcccgttagtcctgaaagatgaacaatattatattgatttcaaccgcttccgtcaagatattcaaggatgcaaattgcttattctaagcaaccctcataacccgggtggacgtgtatggaccaaagaggaactgtctcagatagccgacatctgctatgaaagcggcacattggttatctctgacgagattcatgctgacttaaccctgcctccatacaaacatcctacctttgctttgatttcagagaaggcacggatgaactctcttgtctttatgtctcccagcaaggcattcaacatgccgggattggctagttcttatgcaattattgagaatgacgaacttcgtcaccgtttccagacatatatggaagcaagcgagtttagcgaaggacatctctttgcttatttaagtgtagcagctgcttacagtcatggtacagaatggctggaccaagtggtagcatatattaaaggaaatgtggatttcactgaaacgtatttgaaagaacatattcctgctatcaagatgatccgtccgcaagcctcttacttgatctttctggattgccgcgcattgggactcaatcaggaagaactgaaccgtctttttgtagaagatgctcatctggcgctgaatgatggaacaacattcggtaaggaaggcgagggatttatgcggttgaacgttgcttgtccacgtgctacgctggaaaaagcattgaaacagttggagcaggctgtaatggatttaaaatagtcttttaagtccattacccggttcggaaataaaatcaatccgttcaggggatgaagctatatttcctgtctcactcttgctttttactattttattttgtatctttagtgcttctcatcttcccaaagacaggtaatcatattacaaagtgaccaatatcatcttataaggtgatattggtcactttgcaatgtgcctattgtcccattgtaacgggacgacttaccggctgcataaaaaaactaatctctgcactgaaaacccttaatctttgcactgaaaagtcttaagtacaagattgaaaaactagtttgttgcagtatgatgatatgacaatgcctcaactatggcatcacatttaccggaatcagccgtacctcactattcaagccggagggtaatggactccaatgtccataattggccggacgatagttcaaatcaacaatattgatttctttgaatttgcgccactgcactccctgcctgtctaattctgtaattcgattcgcagggagattcgtgacttctatctcgatgtggttttttccgggttttaagaactggcccacctttagttgataaggcactgcccatgcgcatcccgcttcctgtccgttgatgcggacacgggcactttcgcgtacatctcccaaatcaagaatccagtcgtcggcctgcaaagtcggcaattcgatgtctaaggaataaacaccggttcccatgttcgtttgggctgccggatgatcgatatgggtccatgaacaggggcgatctatatcaaatgttccttgaatttccggtttgctttcggcgaagtgtaacttccaaccatgatccagacgaagactgaaaggttgctctttgacatacttccacggtttggatgcctgcaaaggttgttgatatgtttgcagaatgaacgattcaccggattttaattgcagatagacttgtgtttttccgtttgcctgtcttaccttagcttcaccacattctccggtcatgggattgaagagagcggctgcggctgcattcgttcccaatgtgatccaaccgtccactcctttattttgcaaggaagagatgaaatagtggtgtcccgtatcattcactcttcggatcgcttgtagtccgaatttggttttcatttcttcgggagaaatattgcagctggccaatgtgcgtgcataatccgttcctgtgataatcttcccctttccgattggagtaacggttgtttccgagaaagaaacagccggaagttgccggagcgtacgctggtaactttggcgtttttgttccaactgaccgtatcccggtacatctgtcggataattttcgaggaatacgatagtagctccctgtttggccagttcataaagatgtgccaatacatcactcggcattaggtgtgcagcaggcactaccaatgctttgtagcccgttccgcctgaagtaaccaactgtccgtctttgaaacgtgtactgcgaataaagttatcggaaatataatccccgtcatacccgctgttgttgatgcgatggatagcgtcgataaacttaggagccagtttatccatgtggtgtatcgtgaataataacaatcgtcccggttgctcattccacatatcatataccggaagataaatcaggaaatcattatccggccgtcccatttgcagaaagctctggcaacgggtgatatagttgaagaacgaaggggcatcacgccaaatactgtttgtcggactcatattgatagaagcgtagaacaaccatccgggccattcggcttctttcggagaatacggagtgccgtggaaaaacatgtgattgactccggaaacaaacatcaaatccatatccggtttacattgcgacagggaagtacggaaatgctccgtcagccatgtaaatgtctcggaagaagtatacgtttttcctgcaatatgagctgccgaggaggcatatttcagcatagacaggtccgaatcattctttttggtcaatgagtcctgacgcaatccttcgatgtggaactgcgacagtccgaaaccttcacattccggaatatccacggaagcatagatatcaatcagattaccgggcgaaccatgtgcctgattacgggtgatactaccgtttttgtgtgcccagtctgtccattgatgactgaagttctccaataagaggtcggaaatggtttcccggtaatccgacacgatacgtctgctaacttccggacggtttttatccaggaattcggggaaatgttcttccagtttatacccccgtctacgagcgaactgttccaggaaatcatccgtccagtcagcttgataaacttcgtatgaatcgttgaagaaagtatgtggataacttgtcttgctacttttgaaagcacggtcaaagcgggaaagataattttttaccgccttttttgagagatgattcatcacatagccttctcctcccggagctgcccgtttcactttctgccttgtttttccgatgtaaagagcgatcactttccatttgccggcaggcgctttccattgcagtttgtcttttttgacgtgagcagtcaggttgatacatttgcctttctcatcatatgccatcacccggcttagtacagaaaatggttgttgcttgggatcggtcacattaatatcctgttcaatctctttgccgccctctatttcgtatgtctggaagatagccttggtagccgcatcttctatactaacttcaggtccgccaaaaggccatccggttccggtattcatatcaatctcaatacccgtacgttttccttccgtttgtgtatgcttaagcatttccatccagcggggagaaaggaactgaatttcattcgcgtcattgccttgcaccccatagataggagtaatttctactgctcccattccggtacgtgcgtattcttccagattatacgtcagattcttttcgtctacggcacttcccagccaccaccatctggcgccgggacgtgcttccaccggagtgtccggccattgttgtgcttgcattactccacctgcggcgagcaggcaaagaactatcaattctcttttattcatcattctttcggtgtgttatagtattctatattttctgcgtcatcagttacaaaaagcggtcgtccgtccggctgttcaaagtggaagcggatgccgtcgaaggtaatgttccgtgcgtggcggatataaaaccctttggcgggaatagtgccgaacatccagggttcggggtatactttctcctgttcgggcggaatacgtttgccatcctcttcgctatatcctcctttataatagaggtgaatattccgaaaagttacgtcctcaatacatgcacccggcactccgttgatgatagaagcataccggctgtcggcattccatacattgatatcgctgataagaatacgtttcatggtacctacaggagtaccttcaggactgcgcatacgtgcgcccaaccgaaggaaaataggcgcgttgactatatttctcattgtaatattactgattacaatatcttccagatgtcctccgtctaccgtttccaatgccaatccacggcaatgttcaaagatacagttcgtaatcgcaatattgcggaaacctccactactttctgtgccgagtttgatgcgtcccgtacggaaaccatgatcgggagcctgcggttcgtccaactgccaagtgccgtccattacactgcctttgtcaaagccgctgacataacaatcactgatcgtcacattttccgtatcttggaagcgtcctaatccataagaggctttcaatacaatggcatcatcccagggggagttcaccgtgcattggctgatacgtacgttccggcagcaatcaatatcaaagccatcccggttggtgtctactttcagattcataatcgtcagatgatccactccggtagccaacagggcgaaatgcccgcaatgcagcatggataaatctttcagggtcacatttctgcaatctttcaggctgatagccttattgcctacccccggtaggcgactctcttcacgggtcaagcctttgccatagattaagccgggaccactgatcgtaatattctccagtccgattccccaaattaaagagtttttccaatggctgtgaccgaaatcctgatacttattatgttcattcggttcggcggtatcatatccttcctcttttccgggaaaggcggcaatgatacgggtgccctgttccaaatagatatgaatgttgctttttaaccggatggaataacacgcatattctcccgcaggtagatatactgtgcctcctccggcctgtgcggccgcttcaattgcacgattgatggcaggcgaatcaatcgttttcccatccgctttggctccgaagtccattacattataaatggctgcatgtagatagatgcaacctattaacagactgaataataaatagatccttttcattttttgtcgattttggcaaaaatatccggtaacatatagtagttgtaatccgctttttcattctgttcgtagaaacagaagtaaagccggaaaggcttgcttccttcgtttcgcgaagaagccggggagagactgcaacgtccggtcagtacagggcggtcggttcgtttgcctgattcgtaaagcatcaggggagttgcatccttatgtccgtcactcaagcgaatatcatcggtaggagtgacagcctgcagcgtccgtaattgcatactttctccgtagtagcaagtgaaggcttgtccctccacgctgaatacattgatgtccgaatccggttggcaatcgccgaaactccaaaatagggcatcggcttccggagcagaggcgacttctacttccagaataaatccacgactatcgggcagtgctttccattggaaggatactccctgtatcttttctttaggttttagccagtggctttcatttccttttgatatgcccaaccggaaagtgccggcaggtggcgtcagtgcttgtgcttgcgcatcaatgagcaagattcccagcagtacgatggtcaggagatgtcttaacatagttgaagttgatattactttgttcgttctcttttagttcaatgacattcttttcttctgtctttaatgtaatttcagacaagttgaaattcttcgtatagcagattttgcccggtttgtcggtctgcgcttcgatggcataaagatagaaattttccagacgtaacgagtcattccatcccgaagcggagataaattcgtccacattttccgcttttacctttgatacgtagacattgcggaaacgcggataacctttttcgggaggcgttaccggagtcagcatgattctccagtgttccgggatttctttcccttcatactctttgggtaaagtgctgtaactgtaactggggttccagttcaagtctgccgccagcacgtgacggacgttttccgcttttacttcggtcatataaatgttttcgattgtccctccacggttcatggcgcttttcaaccgcagcacggcggaggtgccgattgcttccagattatatcccaatacattccgtatgctaccggaagtttcgcttccgcaggtgataagtccggcacctttgcgggcgatgcaattgcgtatgaccacattttccgtaggaaggttcacccgcagtccgtctgcatcccgtcccgatttgatacagatattatcatcgttacagtctacatcgcagttttcgaccaagatattgcaggaagaatcaatgtcgataccgtccgtgctcggaccgtgtccacctatattgttgttgatggtcaatccgtctatcgtgcaataatcggagtaaagaatctgacatccccaaaaaccggtacgcatcagggtaaatcctttcaatgtaatgtccgagctacgttctatgaggatgccccgtacccgtttgcagtcatgatccacaatccagcgcaatccttttgcttcgtattctttccgcatttcccaatatttatcccaaaatacttttccccggcagtccagcgttccttctccgctgacggaagcgttcttttcattgacaatgttgataactgccgcgggccatgtcatctcgattcctgcaatccgtgagcggaattcgggataatgatgaatgtaagggctggccagtaaagtcacccctttgtccagttgcaggttgacaccgctttttatgaacagtgcgccagtctgataatatcccggctgaaaaactaccgttcctccaccgatgacggcacaactgtcaattgctttctggatagcttccgtgctaagcaccgtgctgtctgctactgcgccaaaagaattagcggataaaattacatggtttccgggcatttgccggctgcctacactatcggcccatgacaaatccggttgttgcggtacttgcccccattcgaagctgttgtttcctgcctgtttagccgttggggtggcgcaagctgctgtcaaaagtgtgcctgccaataggaacaggggaaagatgcttttggttttcatatttatctaatgcctgattcttaatacttaatacctactacttatctcttaatttccgtccggtttttcaatttccgtgaatggtgattcgttccagtggaaaccatttacatcgtccggctgtgccggattataggacgggtctattttcaggtgtttagccagttccggtacggctttcttcattccttcaatcacacattgggctatttgataggctccgtatggattgaagtgggtgttatcctcaaaagctttggtctgtcccggataagtgcctgccggatagtgtacgaaagcacgtttcgacgtttctgttcccaaagcttcataaagcgtacgggtcatctcgttgaggtcgatcaacggaacattttctttagctgccagccagcgcatggcttccggataatcttcgtgtgtgtcacggatatgtccggttgcgtcgaaactccggcgttgggtgggagtgaccagtacggggtatgctccccgtgcacgagcttcatcaataaatgttttcaggctggtcataaaagagtaataagctcctttgcccggtcctttttgcttttggtcgttatgcccgaattccatgaaaagataatctcctttctttatctggctcaatgcttttttcaaacgtcctgcggcaataaacgtattggctgattcgcccgattccgcataattggcgatacaaacgtccgtaccgaaaaaatgaggtatcatttgtccccagcttgcccatggctcgttgtcctggtcgactacggtactgttaccgcatagaaaaacggtaatcaccgacggatcggcaggctcgatgctgatactctggcatacgggtgcatcgccgttaaattccagcgtcagtttatcgtcccagttcagtttggctttttcgcggggtttgatacgtacggattctttttcggaaatgcgggggttgcgtttgttgatgataaatgtttcatctacgaattgtccctttttagtagcgaggttatcaatgaacagtcggcgtgattcgcctcttactgttgtcacccctgcctgtttcttgcttcccaggcgaacggttacttgatagttaccgtccggcacgcggacagaaaagaagaagggtgccttgctgcctttttcgggagtagcgacgagatcatatccatatcccgtctcctcactgtagcggggagcatctgccaactggtatgtttgggctttctcctgtgcattgacacttgccgtagctaagagtagcaagcctatgatcgtagttttcatgtaaaatgatatttaatgtatattgtttatggaatttaggcacggattacacggatttcacggtttttagaattacgcttttataaagcaacagcgtaatccgtgtaattcgtgcctgataattcccatttagttaattttcggtttgagctcgtcaggagaatctttggtataagatttcacatctcccgccactttggtgaataatgcttgtattagctccggagctatcttgtctgccggacggaaagcatccgaattcatataattcaggattgctttgtgcatctggcgggcaacgattcgtttttccggttgggaagtaatgtccatactggtcatcatcaatttaccgttcaagacctttgcttcgaacaacatgccgattttccggctgataaaccaagtatcaatactttgaaccgttggttggaatgttgccgggaagtcggtgaattgcatcacctgcgctttgttcagcagttcccaccattgaaggttactatgatattcggtagggaattcgcggaaaagagggtgatattcattcaggaaaataccggttgtgtgcggcggacgcatcttgaaccaggaagtattccagaatacgggagtgaagtattgtttgacttctttgccgtattgtatctttccggcagccgtaatcagcacatttcctccgtcttgtaacacagccaatgccttggcgtccaaggtgtcggtggtatatactgttccttgtaccagttccacttgtgccggatatacccagaaatcccagtcgtttacggcatcacagccttcgatacgtacttccagatttagtttctgcggtgtatcgattccttccagagtcatatctacactacccagagaataaagatttccgatgggaatgtgatgggtgccgacagttccatgagcatatacttttccgaatttatccttaatggtatatactgtttttgcactttctaagggagcagctccgaaatgagatacttcaatgtcggcatggaatgtttcattgttggcatatacaaatttaggaatacgtgccaaaagtacggtcggactgcaaaagcgtctgaactgttctgcgttgatatatcctttttcttcaaagaacacgtccagtacaccgactaatgcagttccctggccggaataatcattgagagccagcaactggaatcccgcatagtccggagtacgcaaggtcttttcaatctcatgtttgtagcagagtgcctgcaatttgcccgaagccatcataaagtcgtgactctggcttcccatgtggttatcgttcagaatatcccggaagatttcaaagttcttcgctttgttgactccggtatatttacggatctcattgaaattcgggaatacgcaccattgacctgtttcgtgtgatacatacggttgtttcaccgtgtcgattcttgcacgataatccgattcactttccggttgcgcacctgcccaactaagtccgcgtgcgccggctttcacatgatactcattgtgaggttgccattgccagctgtttccaacggaggctcctgtgtatacacgacgcggatcggttgctttccaataatccacgaacttgctgacccatgccacccaacgaccggaaggttcattgccgcaagccagcatgcagtaagaagcgtaattcccatattccttggtcagtgcaatggtttcgtccatcaggtatttgtcaatcggttgtccgttacccagtctcggaccgtggttcggccagctcggtccttccggttgcagatagaaaccgaccagatcggcagcgatgaaagctgcttccggcggacagaaagagtggaagcgcatgtgattcaggccatagttacgacaaatgcggaacacccgttcccaagaagctacatccatcggcgcatagcctgtcaatgggaagtcacagttttccaccgtaccgcgaagcatcgttttgcgaccatttacatagaaccatttcccttctatcttgaaatcacgcataccgaactgtacttgttgtgtgtcagtttgcttgccgttggttaattttgccgtcagtttataaagtgccggactgaattcatcccacgtcagaaactcttttcccatcggaagttccatttccaccggattatctcccggacggatgttgaaactttgatgtacgggagccactttgtgctgaatgtccgtgttaaagctcgcagcggaaagggtgatctctcccttggtggaagaagcagaccgtatattcatgcgaaccagcgctttctgattgctcaaatcgggatatacctgaatatcttctaaatggactttaggagtagcttgtaattcgattcgtccgacgataccgttccagttaccttgtgtctggtcggtgatgctgtgagaatctggacctacgttgatttctttgattctattatcgatacggatggtaatcaggtacgtttttccgggggtggttgcagcagtcaggtcatagacatggggaacacaaagactgttttgcataccaagctcctgctgatttacccatacagtagtttcgatgtgcggacgttccagaaaaagagtgattctttctcctttccagtcagccggaattgtcactttcttttgataccaggccacacctacataatgtttgtcgggagtcagaaagaagggtagctttacttgtccctctatcttgtatttttccatatatgggttgaagtagtaagaactgtcgtagaggcttccggtccattgggtacggacggtcacttcatctcctttcagtttttcgggcatggagccgggcaggttgatagaatcgtcgagggattttttgaaccattgttccttgacgccggtatcttcccggtctatccggaaattccatttgccggataagctgaaagagtgattttgtcccgctacggtcagtatggagataaatacgatagcaatacttactaaaagtcgtttcatgatatatagagttgatatgtttttcattctttttaaaatctgccgctaaagtagagctttttaagggtttagtaaatagaaagatgtacagatacatagaatattgtatcaaaatggacatctaaaagcgttcgtgtacaaaactacatggatttgaaatattgtccatgctctttatctttgaggaggggcggagatgccttatctttgcaaggtaaactttttaatcttaataaggaaccatgaaaaaagtagtaatctggatagctctaagtctttggtcggtgatgacagtctttgccggtgagacagcttacctcttttcttattttatcaatgacagtaaagacggactgcatttagcatatagttatgatggattgaactggctgcctttacatggcggacgttcttatcttacccctgcggttggtaaagataaattaatgcgtgaccccagcatttgccagtcgccggacggaacttttcacatggtctggacttccagttggacggaccggattatcggatatgcctcttcacgcgatttggttcattggagtgagcaacaagcaatccctgtgatgatgcacgagccggatgcacataactgttgggctcccgaactgttttatgatgaaccttcacaaacctattatatcttttgggcaactacgattcccggccgtcacaaagaagtggctaccagtgaaagtgagaagggactgaatcatcgtatttattatgtaacaacgaaggattttcgtactttctcaaagacgaagatgttcttcaatccagatttcagtgtgattgatgccgctattgtgaaagacccgaagcgggaagacctgataatggtagtcaagaatgaaaattccaatccgccggaaaagaatttgcgtgtgacgcgtacaaagaagatagaaaaaggattcccgaccaaagtatcggcacctattacaggaaaatattgggcggaaggtccagctcctctttttgtaggtgatacgctttatgtctattttgataaataccgtgaccatcgttatggagctgttcgttctttggactatggtgaaacatgggaagatgtgtccgatcaggtcttttttccgagggggattcgtcatggaacggcgtttgcagtggatgcctccattgtggagtcactgattgccgaccggaactataatccgcttattcccgataatctggcggatccgtctgtctccaaatttggtgatacctattatctttatggcactaccgatctggattacggacttggacgtgccggaactcctgtcgtatggaaatcgaaagattttgtgaactggagtttcgaaggttcccatatcagcgggttcgactggtcgaaaggatatgactacacgaatgataaaggtgaaaagaaaaagggctatttccggtattgggcgcctggaaaagtgattgagcaggacggcaagttttatttatacgttacgtttgtgaaaccggatgacaagatgggaacttatgtacttgtagctgatcgcccggatggtcctttccattttactgcgggacaggggcttttgcctcccggagaagaaggaacagatagcccggctgtcgttgatgatattgacggagaaccttttattaatgacgatggttcaggatatatcttctggcgtcgccggaatgcgggacggctttctgcggacaggcttcatctggatggtgagccggtagctctggcaacagcccgccagggatattccgaaggtccggtgatgtttaagcgtaaaggtatctattactatatttatacgttgagtggtcatcagaattatgtcaatgcttatatgatgagccgcgagtctcctttgacgggttttgtaaagccggaggggaacgacatttttttattctcttctcctgaaaatcaagtgtggggaccgggacatggcaacgtgttttatgacgagggaacggatgaatatatttttctctatctggaatacggagatggcggaactacccgtcaagtgtatgctaaccggatggaatttaatgacgatggaacgataaagacattaatccccgatatgcgtggtgtaggttatctggctgcttcccaagagacccggccgaatctggcattacagtcgcatttttatgcttccagtgagaaatctccccgtacttccgtggtcaatatcgaaacgcaacccaatcaaccgttgccggaaaaaggttcggtgaagagctatacccgcacgcatacttatcaggctacccatgtagctgacgaatcgaatggaacccgttggatggcggctgatacggatagcagtccgtttattacagtcgatttaaaggaaatccgtaaggtcggggagtgccagctctattttacccgtcctactgaaggacatacctggcgactggagaagtctatcgacggaaaacattggcagatgtgtgccgaacaagggaaagtacaagtatgctctccacatattgctaaggagataggagagacacgttatctccgtcttcatattcgtaggggagatgccggtttgtgggaatggaaaatatatgaataacgttttataacgctaataatcaatcgaatttatgaagtatatggtaaaaagtaaaattctggctactttctgtgccggtctattaaccgtttctaccggaatacaggcagcagagagactggcaaccggaactcaacagaagcaagctcaaaagactgtaattgaaacttctccctggtttgatgataaagacctgactttgacgggtgtctattattatcccgaacactgggatgagagccagtgggaacgtgacttcaagaaaatgcatgaattgggatttgaatttacccattttgccgagtttgcctgggcgcaactggaaccggaagagggacgctatgattttgcatggctggacagggctgtagctttggcagccaagtatgatttgaaagttatcatgtgtacttctactgccactcctcctgtatggatgagccggaaataccccgaaattctattgaagaatgaggatggaacgatacttgaccacggtgctcgccagcatgcttcatttgcttcgcctctttacagggaattatcatacaagatgattgaaaaactggcgcaacattatggcaatgactcccgtattatcggatggcaactcgacaacgaacctgctgtacagtttgattataatctgaaagcggagcttgctttccgtgattttctccgtgccaaatacaataatgacattcaacttttaaataatgcatggggcactgctttctggagtgaggtttattcgtcttttgatgaaataacgcttcccaagcgcgtacagatgtttatgaatcatcatcaaattttggattaccgccgttttgctgcatcacaaaccaatgatttcctgaacgaacaatgtctgttgataaagaaatatgcaaagaaccaatgggtgactacgaattatataccgaattatgatgaaggtcacattggtggtagcccctcgcttgattttcaaagttatacccgttatatggtatatggtgataatgaggggattggtcgtcgaggctaccgggtaggtaatccgttgcggatagcctgggcaaatgactttttccgtccgatacagggaacttatggtgtgatggaattacagccgggacaggtgaactggggcagtatcaatccccaacctcttccgggcgcagttcgtctgtggatgtggagtgtgtttgccggtggaagtgattttatctgcacctatcgttatcgccagcctctttacggcacggaacaatatcattacggaattgtcggcacggacggagtgactataactcccggtggaagagaatatgagacatttataaaggagattcgtgaacttcgtaaacatagctcttcccgtgaaaccaaacctgccgattaccttgcccgtcgtacagctattctttttaaccatgaaaactcctggagcattgagcgacagaaacagaaccggacatgggatacttttgcacacatcgaaaagtactatcgtaccctaaaatcattcggagctcctgtcgattttatttccgaagcaaagaacttgtccgattatccggtcgttattgcaccgacttatcaattagctgataaagaactggtagacaaatggatcacttatgtaaagaacggcggaaacctcattctgacttgtcgtacggcacagaaagaccgttatggtcgtcttccggaagctccctttggttctatgattactccgctgaccggaaatgaaatgaacttttatgatttgctgcttcccgaaaatcccggtactgttgttatggacggaaaagagtatatttggaatacatggggagagattctgaatcctccggcagatgctcaagtatgggctacttataaaaacgaattctatgaaggaagtccggctgtgactttccgcaaactggggaaaggtacgattacctatgtaggagtggacagccacaatggagcattggaaaaagatatattgaaaaagctatatgtacagctgaatatcccggtaatggatttgccttatggcgtgacaatggaataccggaatgggttgggaattgtattaaactattcagatcagccttataccttcaacttatcgaagggagccaaagcattgatcgggactacagagattcctacagcgggtgtatttgtgttttcagtgaaataagtgttgaaaagaattatgttacaattaaattatttattatgagactgttgaactattgttttttgattggaggaatattaattgcttcttgtgttggtaattcgagtaataaatctcaaaatgataagaaaataaatccggcggatactatttatttaggagatttacgtgaaaaatttgaaggagattctgtcttttttgcaaaagtggcaccggatctgatattgacagattatcaatatttctgggcggcaacagagtcagatgccatagccaatgggttaacaaaagattattataagaaagtaaaacaagaaattactgccacaaatgaagcaataaagaagggagtaatgaaaggcgctaatgtgaaacgaattcccgattttcagagtgtgaaatagctaagaatgttttatcttggtatgttggataatagagtaatgatatgattaaaagatattttctaagtttaataacttgtacttgtttttatttgttagccgcttcttttacttcgaaaaatggcaactatgaagtgcttaaagtaaccgctccttttccgatgcaacctattaaagtgtttatctatcctgataaggactttataattacagacttcggtgccgtcaatggaggaagagtagataatacaaaagcaattactagtgctattgaagcgtgtaaccaatccggtggcggacgtgttgttgttccggcaggtacatggctgaccggtcccattcattttaaaagtaatgtgaatctttatttggaggagaatgcggttttgaattttacggataatccttctgattatcttccggcagtgatgacttcatgggaaggcttggaatgttataattattcgccattactctatgcttttgaatgtgagaacgtggcgattacaggtaaagggactcttcagccgaagatggatacctggaaagtatggttcaaacgtcctcagtctcatttggaagcattgaaggagttgtatacaaaagcttcgactaatatccctgtgatcgaacgtcagatggcaataggggagaaccatcttcgtccgcatttgattcatttcaatcgttgcaagaatgttttattggatgggtttaagatttgtgaaagtccgttttggaccattcatctctatatgtgtgacgggggattagtgcgtaatctcgatgtaaaagcacacggacataataatgacggtattgattttgaaatgagccgtaactttttagtggaagattgctctttcgatcagggggatgatgcagtagtgattaaagccggacgtaatcaggatgcttggcggttgaatactccttgtgaaaacatcgttatccgtaattgtcagattctaaaaggacatactttacttggtatcggaagcgaaatatcgggaggaatacggaatatttatatgcatgactgtactgctccgaattctgtgatgcgccttttctttgtgaaaaccaatcatcgcagaggtggatttatagagaatgtttatatgaagaatgtaaaggcaggaacggctcaacgtgtactcgaaatagataccgaagtgttataccaatggaaagatctggtacctacttatgaagaacgaattactcgtattgatggtatttatatggataaggtgacttgtgaatcggcagatgctatttacgaactgaaaggtaactccaaacttccggctaagaatgtaatgattagggatgtaaaagtaggagaggtaaaggagttcgtgaagaaagtgaataatgtagagaatgtagtggaaaagaatgtgacttatgataggaaagggaaatgaccctttcctgaaagtagtagaaaatttcatgctataattttagtataatgtagtatcttagcagcaaaattgaaaactttatgctaagatgaagaaatccttttattattactgctaatcactctatatagcagtatcagctttgctcaaagcctgaaatctatatctattttaggcgattcgtattcaacatttgaaggatacctgcaacccgataccaatagcatttggtattatgtttctccgcgacagcaaacggatgtaacttccgtaaagcagacctggtggcataaattcatcaaagagaataactgccgcctttgtgtcaacaactccttttccggtgcaacgatttgtaataccggttataatcaggctgattattcggatcgttcttttattacccgtatggataagctgggatgtccggatatcatctttattttcggtgcaacgaatgattgttgggccggctcaccgcttggggattacaagtatgaagggtggaccaaggaagatttatatacattccgtccggctatggcatatctgcttgaccacatgattgatcgttatcctaatgttgaaatctactttctgctgaactctggtttaaaggaagagtttaatgaatcagtcagagctatctgcaatcactataacattgattgtattgaactgcatgatattgacaaaaagagcggtcatccttcgataaaggggatggagcagattagtgaacagattaagatgtttatgaggaagacgaagtgaaaaacaacggaaatataagaaataatattgccacttgctactctttgattaggaatactatttcaaagagtgccaagtggcaataagtttagttgtttatcttaatatcccggattctgcattgctttcttttcttcattgcttagtgcagaaccatttgaattggtgataccgtccaagaaggcttgggggatcggacgatagtaatgtttctccgatttgaattcgccaagacctctgctggcaccgtcgttgaatttatgccagcgggcgtctaacgtcttggtacgtgccagatcttcccagcgttgcaattcgccacaaagctcacgggtacgttcatttaataggaagcacatcattttgtcagcattggatgtacatcccagttcgttgtagataggagtgtcgactgtagagttataaacgtctgccacactatttaatttcatcgtagttttggtagaagcagtagtctcctgttcgatattgtttgactcataataggtgttttcttcccagtaaatagcaccttcggaggagtgaccgcctcctttcccggaacaataaggattattcttataagcttgtccaccatctacgttcttactacggtcttcaccagttttataaccggcacgttcacgtagtttgttcatccattcgacagctttgtcataattggcttcacctttacgaatatatgcttcggcaaccattagtacatcatctgccgaacgggcgatgatagcatcgcgagtaccgaattgagatgcgatggaaacacgataaccatcacggaatttagataaagctactgaacgcttgtgaggtatgatatcgtaataattacctgttttctcatttatattccagctgtgttcctgtcctttgaaatagcgtacatatgtatacgtgttacacatttttccatctttcaaaacagtatatgccggagcgttgggatatttctcatagcgattgtctcccgggtcattcacgatgtatttcataccgagttcacctccactgaaacgtttgtcaccttcttttacacctgccggagcgtatggcatatcttctgctgtccaggtgggagcacttttggtttcgttggctccataacaggtgatgaatgatttccagaaacgagagtcattgacacggtcaaatacctgcatggtatactctgtagcacttacgtatgagaattcacgtcctccggagatgtcacgtttacatccacctatatcattaccttggtatacggccggataataaagatgcatctggtttccataacgtccccatgttgattcatcattagagaattgagctgctagaatcacttcacttactttttcattggctccgttcggctgttcatagtcccaaagttctacataatcattacacaacggatgtgcgtctacaacttccgaaccatattgaataacagcatcgaggtcggatgctatataattactattccaatcgctgtacaattcggaggcacggaataaatgtgcttttgcaaggaaatgggcagcagcatatttgttaattcgtccgattgattcacctttatccggaagtagtctgtaggcttctccaaaatcagctataacctgtgtgtatatttcttcagcagaattccgtgtgaagtacgtttccgcgcttgtagacggaactaatttcaacggtacaccaccaaattgcttcactaattcaaaataagcataggctcttagaaagtgtgcttctcccaagcgtgtgttatatgtgggtgaactttggttataatattgaggtatgttttggatcaatatgtttgcgggttcaaccagtccgtagtaattgtcccagataggttggttagcggcattttcagatgaatttaaatcttgactatagtgattccatgctggaataacattattagcatcagtaaattcatccactcccatgttgtagcactgaatcccccatatatagttgaatttgaatttcagtttctgataggctccagtcactaattcatcaagaccttcttgtgtcttaaagcggtcggtactatgttgagttgttaaattctcatcaaggaaagattcactgcatgaagtgatcgagcttcctgttacgctggccattaaagctgcaaataatattctatttaatttcataatgtctttactttaatttgtttattagaatccgatgttgacacctattacaaaactcttcaaagtggtaggtgaaccaaatattttggtattattgtcataatttaccaagtctgtatccaaaaagtcacatgctttatagatattgaatggattcatggcttgaacatatagcttcaaattattgatacccaagttctttaattgttgtggggtaaagttataacccaatgagatattacgaactttgatgtacgagccatcctgatagttcattgcgctgttaaaggcatcggctccttcaccgttggaaccgggtgaatagtattttgcattctcattggtaccggctacccaatagtctattttacgttgcatatagcgaccgtcaagagtaacagctccctgtggaacagtaaatccccaacgtgataaaataaagaaggatagctcaaaattcttatagctgaaagtgttactccagccacctgtccagcgtggacgtgtatgccctacaattttcttatcgtcattggcatctattgtatcatcattatttaaatctttcactttgatttgtcccggtttacgtccgtatttggcagcttcttcagcttcttctgttttccagatgccatcatatacccagtcgtaataaacaccgatttcttcaccgacaaaccatttgttgttcacatcttctgttctaccattagacaattcgtcgattcggtttctatccattgaccatgttaaagtagtgctccaagaaaaatcttttgtttgtataggtattgcatttacttgtaggtcaattccatatccggatgttttacccacattggcataagtagaaacatagcccgttagtgaaggaattgacatttccagtaacaaatcatcagttttcgttttgtatgcatcgatactaccagtaagtcggttattaaagaaaccgtagtcaacaccaacattgtattgtgtagttctttcccagcctagagttggattagccattttggcgggttccttctgtgaaggatctgaaggtacatagcccaaagatgactcattctgtccccagttatagtataagcctgtgatagcgcctttagttgcatatgctttgattgccgcattacctgtaacacccatacctatacgaagtttcaactgattcagccaactgatgtctttcaggaaatcttcctgatccattctccatgcgatagcagcagaagggaaacttgcccatttgtgcccttcggctaattgagaggcgccgtcccaacgcatagatgctgtcaataagtatttatctttataaccatagtttaggcgaatcatataagatgccatttgagtttcggtcagacctgtgccaaaagagtttagtgtaccggcagatcctatattataccaaagctcatccgatgaggctacattagtagctctcatatctcccatctcgtaatggtaggccgaagcggattgcatcaatgtcatgcctaaattatgttgacccagggctttgttataatagatcaggttatccaatgtccatgcacgtttttgttcgttcttgtattgtgcaccattgttaccatctccattaataccatctgctgcattagcaactcctaaagtgtagaattggaattcagggccaaactgaagacgataagataagccttccaggggtttccagattttgccgaaatcaatttgcgaatacaaactagcagaagcacggaaagtgcggcgttggttggtgttgtagtctaattcacgaatagggttgatgatatttacatccccactcggataacggacatattcaccgttttcgtcataaggtactgtccatggaatcatacttcttaatgcgctatagaaatcacccgaaccggttacagacttggagaaactatatccatagtcttgagtggaataagatgcattaattgaagatcccattttgaaccaattgacaggagttacatcaaatgaggtctttaatgtataacgttcatatgcttgccctggttgtgtacctttctggtccaaataaccgaatgaggcatagccttggaatttgtcagaccctccggatgcgcttaaggtatgttcgtgtgtaatccccgtctgtttaccgtgcgaagcccagtcgtatgatcctactaaagatggatcgtagactccatttacccatgccttttcgatgtttttccatgaagcggttacgctaccaaatgcagctttatctgcttcataagttggagtggcagaagcataagaacctgcattatatttggctaagcgggcataatccaaccattcggcggcagacatcatttctgtaacatcgtgtagcgtttcaaaagtgacagtaccggaatagtttagggtcactttaccttcttttccttttttggtagttacaagaatcacaccgttggcaccacgtgagccataaatagctgtggctgaagcatcttttaaaatgtcaatagcttcaatgtcggaaggattgatattttcaatgcctccattttgaattaccataccgtctaccacatacagtggaccctgttccgcattaatagagcgttgtccacgaatattaatgttgcccacctctccgggacgctgactggatgtaatatctacaccggctgttttaccttgcatcccttctagtgcatttcttacaggcattgctttcagttctttttcacctacgcgagccatagcaccggttacgtcactttttttctgtactccatagcctacaactactacttcgtctaaggtctcggtatcttcttgaagagtaattttaaagttggtatttcctgctacggatacttcttgttttttatatcctatataagtgatagtgattgtacctttggttggtacattggaaagagaaaacttgccatttaaatcagtaattgtaccattagtagtaccattaaccaacacactggcaccaataaccggttctccggtaaaatctgtaactgtgcccgaaattgtcttattctgggcataagattctactattaaaaaggagaacaaagtgagaagaaatagccgtcggatagtatccttataggcatacaggtgattacctttttggttgcttttcatactttaattattaagttataaatattggtttatagatcctttattgttgatttatctttttatcctctaatgaagactctttgtttctttttatatggatattcctgtaacgtagtactttatagaggtttagtagtataatatattgtatgatattaatatatttacatagcgtatttattatag

SEQ ID NO: 85 - DNA, 153483 bp, Bacteroides ovatus
  source 1..153483: mol_type = genomic DNA
ttacttcaaagtgtggaagcaaacacaccggaaatgatagcgttcatcaacgaatgcttattaaattgagaatgctccatttttccaatggtagactacagggcggcggagaaacggtttcagtttctctgctgtttcttttgacatatagtcgggggttgttaacgtaagtgtcagttccgtattttctttattaaaatcggctttcatcaatagcatatctgccgaacggcgtgcttcatcaaactcataaactcctgctgaatcgggagcattcagaaaatcatccatcaggggcagggtaataaagagagatgttgtaagcggtttccagtcgtccgtatagaaatggatgctgctatcacaggcaggagcacaaacagtagagactgtacagattacgttcgttgaatcatttaatgccaacactttcatctgccaggtcgattgagctgacatttgcatacggatatagtctttgctaagatcagtcatctccgacttcttgccaaaacggttttctacttgcgctttcatcttactttccagaaagtctatgcaatcttcacgattcacttttgtaagcaaggggcttagagaatccggcatattcacaaacaacgttttggcctcttgtgcctgaagagcagtcgaaacaaaaagtccgacagcagagaagaatatagtaataacaagtttatttattttcatatctatcttatttaacctatgacaaacagtcttgtgtaactgttttaacttttagaccccaaatataagaatatcattccgattaacaccagtataaggtcaatcgctttgctttttaaattcttttcacggaagaaaagcgcaccgaaagtaaaagaaacaaccacacttccccgacggaccatcgaaacgatagaaatcatcgaatcatcgtaacttaatgcgtaaaagtaaacaaaatcggcagcagaaaggaaaatggagatcaggataatcgtccaatcccagcggaacggagtagtggactttcttttaggccaccaaagcaacaacaggataggacacatgataaacacctgataaacattataccaggattgcaccaacatcggattcagagacttcatcagatatttatcatacaaaccactgatagcacctgtaatggcagccagtacaataaaaaagatccatttgttatgcttaaaatcaattccttctttctttcccgaacggctcaacataaagaaagaggcaatggccagcatcacaccaatccattgatagagattcaatcgttcaccgaataccagcatagctcccacgagcaccatcaccggacgggtggcattgataggtcctacaatggttatgggcaaatgtttcattccgaaatatccgaatatccacgaagacaatacgatgaacgacttgatgataatatatttatgctgttcccaaccagcaacgggaacattgaatattgttcctcccaacaagtccggttgataaacggatatcaggataaacggtagaaagatgagactggaaaagaatgtatttagaaacaaaacaggaagtactgcattatctttcaacgatttcttcttgaatacatcataaaagcccagcaaagtagccgagaggaatgctaataataaccacatgagaatatttattatttactaattaccaattataagttatcagcgacagacggttcgccagttatagatgattgctggtcatcacattcaaatatactttccgggtattccacgttgaccagaaacagggcttgccccggagcagatgtcccggctttgcaacggtcctgctgttctataatccgccggaaaccttcaacagtcagtttcccgcgtcccacttcaatgagcgtgcctacaatggctcgcaccatattccgcaagaaacggtcggcacgaatggtaaacacccaggtagcatcttcttcctgcgtccattctgcatgagtgatatgacaaatattggtctttacatccgtatgaagtttactgaaactcgtaaaatcgttgtactcgaaaaggatacgcgctgcttcgttcatgcgttcataattcaactggttataaagacgccagcgatattgcctgttaaaaggatatttcgatgtcgtcacataatatttataagttcgcgcagtcgcatcaaaacgggcatgggtatccggccgaacccggcaaacacgataaatggaaatatcgggaggtagcagacgatttaatttatcagtaacagaagtagtatccaacagttcatcggaatcaaaatgagcaaccatcagagaggcatgcactcccgcatccgtccggcctgctcctattacttcaatttcgcgacgcagaaaggtagacaatgccttcatcagacattcctgcacactaatcccattcggttgaatctgccaaccgtgatagttggttccgtcgtaagccaaataaataaaatacctttgcacgctaattcctcttttttagggttttcgcgcgcaaaagtagtcattttatctcatttatctttgtataattcgcataaacctgtatatttggagaacaaaataatcatgattcactaatacctcacaattatgagtagtaccattttccttattattgcccttgtgacaacaggaatatttgtaatccaattcgttctatccatctttttcggagacatagatgcagatgtagacgtagatgctgacatcagtagcgtagtttcttttaaaggactaactcattttggaatcggattcggctggtacatgtatttagcgggaaacactgaaattcaaagttatgtcatcggaattctggtgggtcttttctttgttctcgctgtgtggtttctctataagaaagcttatcaactgcaacaagtgaatcattctgaacagacagatcaacttgtgggacgagaatgtaccatctacttcaagcaaagcgacagcaaatatactgtacagaccacccgggacggagccatgcgtgaagtagacgtcatctccgaatccggaaaaacataccagactggagaccgaacaatcatcaccagttacaaagacggaacactgttcattcaataactattcaaatacataattttatgacacaagaaatgttgataatggctgctatattagtggcagtcattttgcttaccttcattggtatcctttcccgttaccgcaaatgtaagagtgacgaggtactcgtcgtatatggtaaaacgggaggagataaaaagtcggcaaaactataccacggtggtgcagccttcgtatggcctattattcaaggctacgaattcctgtccatgaaacccatgcagatcgaatgtaaactgaccggtgcgctatccgctcagaatattcgtgtagatgtgccgactacaatcaccgtagccatcagcacagatcccgaagtgatgcagaatgccgcagaacgtatgctgggtctgacgatggatgacaagcagaacttaattactgatgttgtatatggtcagatgcgtatggtgatcgccgatatgactatcgaagaattaaattctgaccgggataagttcctggctaaagtgaaagataatattgatactgaacttcgcaaattcggtttgtatctgatgaacatcaacatcagtgatattcgcgacgctgccaactacattgtcaacttaggtaaggaagctgaaagtaaagcactgaacgaggcacaggctaacatcgaagaacaggaaaagctgggtgctatcaaaattgccaatcaaataaaggagcgtgaaacgaaagtagcagaaacccgcaaagatcaggatattgctattgcagaaaccaaaaaactacaggaaatctccgttgcaaatgcagataaggacagaatctcacaagtagccattgccaatgcagaaaaagaatcacaagtagcaaaggctgaagccgaaaagaatatccgtatcgagcaggcaaatacagaaaaagaaagccgtgttgccgaactaaactcggatatggaaatcaaacaggcggaagctgccaagaaagctgctatcggacgaaatgacgcacagaaagaggtagcactttccaatgctgaactagctgtaacacaagctaatgccgataagcaagcaggtgaagctaccgcaaaatcggaagctgccgtacaaactgcacgcgaaattgcgcaaaaggaagtggaagaagctaaggcacggaaagtggaatcttcattgaaggctgaaaagattgttcctgcggaaatcgccagacaggaagctatcctgcaagcaaatgccatcgctgaaaagattacccgcgaagcggaagcacgcgcaaaggctactttagcacaagccgaagcggaagcaaaagctatccaattgaaactggaagcagaagcggaaggtaagaagaaatcattacttgcggaagcagaaggtttcgaagcaatggtaagagcagctgaatcgaatccagctatcgctatccaatataagatggtagaccagtggaaggaaatcgccggcgaacaggtgaaggcgttcgaacacatgaacctaggaaatatcactgtattcgacggaggaaacggtggaactagcaatttcctgaacacattagtaaagacagtagctccgagccttggcgtattggacaagcttcctatcggtgaaacagtgaagggtattatcaatccggaaagcaaaacggaggaaaagcctgcaacaaaagctgacgagaaaaaagataagaaatagttgtaatccaacataatatacgctgatgagaaaagcatgattacttgttctcatcagcgtttgttttttatatataactcgaataaatcttctttgaacattccggatttattacgttctttatgttacataaaatatgtaacacaaaatatgtaataagtcgtgaagccatatcgctcattctttgtatacaattacaataatcccggaatgtcgcgccactagaaatgattttgcaaaatcatttctcatattctcataatccatagaataattacctgtaattcaaagcaatagcactatgagaaatacttttcaaaaagctgtttctcataatattttgcctgaaatgtcataaaaaaccggtatttctcatactttcatcatgcatttctcataccgggactgctatataatacctacataataaatgtcaacccaacccgaagataagaaaaaaggcagtcaactattatcagggtattacagtccccggtagtcccatatattatgggaaaagattccctagctggagggaatttattcccttattttgcgggaataaattcccataatataaaagaatactttcccacaatatgtgagactaccggaactaacggatatacttacccaagatcatagtattctatatattcgtcaaattgaggcgtttctgtaactccccgcctgcggaaaagtccctgtatgtattcctgctccttcggtttaatcagccgctccttgttgcaacaacggtaatagatcgttttgccaaagtaggctatcatctgtcgtttgataacggtggcatcagcaagcggcacccgatccagcaaatgtttcataccccgtgcaaacaacaccggcttttcatcaataaagtaagtgcagtctacaccatcggaagtgacatgttcgggattaataaccattacagcagcccgctctttcggcattcggagagttacttgtcgccgcaaacatttgtccgcacgcaaacaatgtccattcaagcaatgagcgaagctaacgggcatagaattgtaatcgaaatctgttttcatgtgtgttatgtttagtgggaaagtggcctatttttataaaccgctacaaatgtatgaaaatagctggaggacaggaaataaatacactatttactccaacatatcgataaaatctttatatttgcctccaacgtcaacacaggaacttataagactatatctctcctgcaaaactataaaacaaaataatcatgaaaacaaaacatttacttggagcactactgtcattcctctgtacaattatcttttttagctgtggcaataataatgaagaaaagatatatcctttatcctttgaaaaagagtattacgaacaacctttattaagagcaacagatattaccattagaggtggaaacagagactataccgtgactgtagaagaaactgatattttaagcatcgatgtagatttatccagctcaataggaatgggaagtttaaaagttacccccaaaaagaaaggagaaacaaaggtgaaagtaaaagataatatcaccaacgaaatagttgaattaaaaattaaaattatagacagttatttggcatacgcaataaaagaaagtaatcatccggcactgtccaatggcactgtggtctatttgattaacaatgaatctaaagattgctatttcttccgatatagcgactccaaaaacgaactatcccaaaatccgatagccaaaggaacatacgatttttcagtcaaattagaaaatggtttcggcaactcatctcctacatacgccataccttatttaacattaaattatgcatctgacgaacaaggaaatttcacggatgcatcaacccctcccacccctcacaaattaagatttgaactatttgatggagttacaagtgtaaatgcagttatcaatcttatacaaagatatttaaagatagattgggagcaacttattaacaaggctcttactagaagtgattatttaataataccaacgctgaagacaacaatagataacacggattataccattataggcactcttgatacccgtccggaaataccggaaaatattttagagtgacccgtaaaagatatgaggcggaaaataatgcaaaacatagaacgtatgaaaaaatagcgtatatttgcgggcaaaaaatacaaaatgactacttacaagcttcgcatattaccgctatttttacttgttattgggcttacaacgcttacttcaagctgcaaaaagaaagacatgtcactgaaattgaacaagccgcacaatattcgtggcgttgtcagttacaaacgttctttccctgatttgaacgatgcacatctggaagtcgctaaaaagataggtattagcccgctggcagaccgagaggaagcggaagcaatgaaagaaaagttgactcatatcactgataatgaattttatgcagtggattcattgacacattccattccctacctcgttccacgtgccagcgcattgctcgatacaatcggctccaactttctcgattcattggctgccaaagggctgaatcccaatcaggtaatcatcacctccgtactacgtactgaaaacgatgtgaaacgtctccgccgtcgcaatggaaatgcctccgccaactcggcacattgtttcggggctacttttgatgttagttggaaacgttttaagaaagtggaagataaagacggtcgccctatgcaggacgtgagtgccgacacactgaaacttgttctatccgaagttttaagagatctacgacaagctgaaaaatgctatatcaaatacgaactgaagcaaggttgtttccatattactgcccgatgaacggaagatgaatgtaaattgcagtaaaattcacctccaaacaatcagagaatccaaaacgtttcattaaatttgcagaaatttttctttaatacaacttaatgatagagaagctgattgttcttgaggacattgatccggttattttttacggcgtaaacaacgccaacatacagttaattaaagctttatatccaaagctacgcatagttgcccgaggcaatgtcatcaaagtgctgggcgacgaggaagaaatgtgtgccttcgaagaaaatatcaccaaacttgaaaagtactgcgccgaatataattcactgaaagaagaagttatcattgacattataaaaggaaatgcgccgcaagcagaacagacaggaaacgtgattgtgttcagtgtcacaggaaaacctatcatcccccgaagtgaaaaccagttgaaactggtagaaggattcgccaagaatgatatggtatttgccatcggtccggcaggttcgggaaagacatacaccgctatcgccctcgccgtacgtgcattgaagaataaagaaatcaaaaaaatcatccttagccgccccgccgtagaagccggagaaaagctcggtttcctgcccggcgacatgaaagataagatcgacccatacctgcaacctttatacgatgccctgcaagatatgatacctgctgccaagttaaaggaatacatggaattgaacattatccagattgccccgttagcctttatgcgcggacgcacgctgaatgatgcggtcgtcattttggacgaagcccagaatactaccacacagcaaatcaaaatgttcctcacccgtatgggtatgaacaccaaaatgattgtgacgggagacatgacacagattgacctccccgcttcacaaacatcgggattggtgcaagctctccgcatcttaaagggagtgaaaggtatcagttttgttgaactgaataaaaaagatatcgtacgccataaactggtggaacgtatcgtggatgcttacgaaaaattcgacaaagaagcgaaagccgaacgggagaaacggaaaaacgaacaactggttatcaacggcgaacgtccggtgaaactggccaaagactaatcgtctttagattcgaaatcctattgcgacttgttatttgtaacttgtaatttgtaattataataaagacaatgaaagcattaacaaaaacagatttcaactttccgggacagaaaagcgtgtaccacggaaaagtgcgcgatgtgtacaacatcaacggcgaaaaactcgtcatggtagcaaccgaccgtatttcggcctttgacgtagtacttcctgaaggtattccttacaaaggacaaatgctgaaccagattgcagctaaattcctcgatgccactactgacatctgtccgaactggaaaatggctactccggacccaatggtaacggtaggcgtattgtgtgaaggttttccggtagaaatgattgtacgcggttacctgtgtggtagcgcatggcgtacttacaaaagcggcgtacgcgaaatttgcggcgtgaagttgccggacggaatgcgcgaaaaccagaaattcccggaacccatcgttactccgactacgaaagctgaaatgggattgcacgacgaagacatctctaaagaagaaatcctaaaacaaggactggctactccggaagagtatgaaattctcgaaaaatatacattagcccttttcaaacgcggtactgaaatcgcagcagagcgcggactgatcctcgtagatacaaaatacgaattcggtaagcacaatggcactatctacctaatggacgaaatccacactccggattcaagccgctatttctactctgaaggttatcaggaacgtttcgaaaaaggcgaaccgcagaaacaactttctaaagaattcgttcgcgaatggttgatggaaaacggcttccaaggcaaagacggtcagaaagtaccggaaatgactccggctatcgtacaaagtatcagtgaccgctacatcgaattgttcgaaaacatcaccggtgagaaattcgtgaaagaagatactagcaatatcgctgaacgtatattcaaaaacgtcgaaacttttttgaacagctgataagcgataaatgacagataataaatgatagttgatagatgataaatgatagttaatatgcagcttatcgcatataactattaactctgtcatcttccaactatcatttatcaactatcttcttcaactatcaactatcatttatcaactatcaactaaaaaatggattacccgcaacaacatatcaagccttacgacgaagaaggaaaaaagaccgagcaagtggaacgtatgttcgacaacatcgcacatgcctacgacaagctgaaccataccttatctttaggtatcgaccgcagctggcgcaaaaaagctattgcctggttacacccttttcaaccgcagcgaatgatggatgtagcgaccggtacaggggattttgccatcctcgcctgccgcaaactgcaacctgccgaactaatcggcacggacatctcggaaggtatgatgaatgtgggacgtgaaaaagtaaaaaaggaaggactgtcggataaaatatcttttgcccgggaggactgcacttcactctcttttgccgacaatgattttgacgctattactgtagctttcggtatccgcaacttcgaagacctcgacaaagggctctccgagatgtgccgcgtactgaaaccgggcggtcatcttgttattctggaacttaccactccggaccgcttcccgatgaaacaactgttttccatctactctaaagtcgtcattccattattgggtaagcttctatccaaagataacagtgcctaccgctatctgccggacaccatcaaagtatttcctcaaggggaagtcatgaaaggagtcatcgcccgagccggttttagcgaagtcaacttcaaacggctgacctttggtatctgcactctttataccgcaaccaaataacctaataatgtaaccttatgaaaacaacaaaatcaattggactatttctactctgcattttttgttgtatcaatttcacctcttgtgatccggcaaacaatggaggagatgacctaatatgggattttgctcccatagttctttacatttcagtacaggatgctcaaggcaatgacttactgaatccactcaccaaaggctctatcgccaatcaaggaataaaagcgatctacaaaggggagacttacgaaaaagatgctccgctaaacgaacgcaccagagcttatatggcctatttcacaggtctgcaaacaggagtaagcaaagacggaaaatattatctgactttcggggaattcaatggcgatcatacattcgataatgagaaagtagaaatagactggaatgacggaaaagaaccatctgtcatcactttttccagtaaactgacctggaaatcaaagaaagaacccgtattcgaccggaaattctgcctgaacggacaagaaattgaccagaaacaaggtttagtaattaccagccccccctctcaatctgaacagaaattcgatatcgttgccgtagaatatggcatagatgtagaaacggacgaaattaaagaaaaaataaaagccgatttagagagtaaatctccctataccaatggagaatcatacagtatatctattcaggaaaagaactccggtacatatacattactcaattctgatggctttcctataacaaaaaaggaattcgcaatcgaagaagcagaagctcatggtatgtatggaataacgactgaaatagccaaaacttgcagacttattcctcctgacgaccaaatatacaaccatataaaattgaaattaggcattgacggcgagaagtcatctaacactttcaatatctttatcggccgcccttataatttctggatatacgaagatttgacggaatactataaagacaaataccctgacggtaaagtaaaagaaatagtacgtcttctaaaaagtaaacccaataacccaactaagcaataaatgattatggaaaaatatggtttaatcggctaccctctgcgacattctttttctatcggatactttaatgagaaattcaaatccgaaggtatcaatgcagagtatgtgaattttgaaattcccagcattaataacttcatggaagttatcgaagagaatcccaatttatgcgggcttaatgtgactatcccctacaaagaacaagtgattccttttttggatgaactcgaccgtgataccgcaaagataggtgctgtgaatgtcattaaaatcatccgccagcagaaagggaaagtcaaactggttggctacaactccgacatcatcggatttactcaatccattcaacctttattgcagcctcatcaccaaaaagcattgattctgggtaccggcggagcttccaaagccgtctaccacgggctgaaaaacctgggtattgaaagtatattcgtatcacgcacccacaaagccgatgatatgctgacttatgaggaactgactcccgaaattatggcagaatatacaatcatcgtcaactgtactcccgtaggtatgtttcctaaggtagatttctgccctaatattccttatgagctactgactccaaaccatttgctctatgatttgttatataatccgaatgttacgctgttcatgaaaaaaggagaagcacaaggggctgttgttaaaaacggtctggaaatgctgctgctccaggcatttgccgcatgggagatatggcataaataaggattagagagagtttttatgaggagaaaagttgtatatagcatcattattatcatgctggcattgaccggctgcaccatcggaggaagtttttatatgttaaacttttcattgactccgaatgccaagattttgtctaaagatgctgactcttatcccttcatgtatagaaactaccctttcctacgtccatgggtggacagcctgaaacaagtggatgcactgaaagatacattcatcatcaatccgcacggaatacaacttcatgcgtattatgttgctgctccccaacccaccagtaagacagcagtcattgtgcatggacatacagataatgctatccgtatgtttatgattggttatctgtataatcgagatttaggatataacatattacttcccgacctgcaacatcagggagaaagtgaaggcccagccatccagatgggatggaaagaccgttgggacgtattgcaatggatgaacattgccaatgagattttcggagatagtacacaaatggttgtacacggcatttcaatgggaggtgcgacaaccatgatggtgtccggtgaggaacagaaaccatttgttaaatgctttgtggaagattgcggctacaccagtgtatgggacgaattctcacatgagcttaaagctagtttccaccttcccccttttccactcatgtataccacaagctggctttgcgagaagaaatatggatggaattttaaagaggcttcctcactgaaacaagtagccaaatcacagcttccgatgctgtttattcacggggataaagacacgtatgtgcctacctggatggtatattcgctctacgaagccaaaccgggacccaaagaactatggattgttccaggagcggctcatgcagtttcatacaaagagaataaacaggaatacaccgaccgagtccgtgcattcgtcgggcgatacattcattaaacctattataacaaggagttttagattcataacagaaaaagtttctatatttgcaaacgtaaaataatcgttatgaaatcaatattgacttttatactagctacttttcttctgttcccactacaagctcaagagaaagtatacacggtggacaacctcccaaaagttcacctgcaaaacaaaatgcaatatgtttgcaacccggccggcatactttcacaggcagcttgtgacagtatagactccatgctttatgccttggaacaacaaacaggaattgaaacggtggttgccgtagttccatcaatcggagaagaagattgtttcaacttctgccatcagttacttaataaatggggtgtagggaagaaagataaaaataacggattggttattttgttggttacagatcaacgttgtatccagttttataccggttatggtttggaaggagtgctccccgatgcgatctgtaaaaggattcaaaccagatatatgattccttacctgaaagacggaaattgggatgccggaatggtggccggcctaaaagcgacttgtcagcggcttgacggttctatggaaaatgatgctctctccgattcgaacagcggtggttcttttgattttgttcttgccattctttgttttattgctattggcggaggtcttgctttcttttcggcacgcaaacaaagccgttgtccgaattgtggtaaacatcaattacagagaagcggaagtgctgtcgtatcccgaattaacggggtgaaaaccgaggatgttacctatacatgtagaaactgcggacataccatcatacgccgccaacaaagttatgataatgattaccaccaccggggaggtggcggaggtggtccatttattggaggcttcggcggaggtagtttcggaggcggaggcggtttcggtggaggcagctttggcggaggcagctttggcggaggaatgggcggtggcggcggcgccggttctcgtttctaaagaaaataagtagaaaacaaattatcaaattcaataaaaacaagaaacatgaagaagtcaattattatcatcttagccgttgtggctatccttgtcatatgggcagtaagtgtatataacggtctggttactatggacgagaatgtaagtggtcaatgggcaaatgtagaaactcaataccaacgtcgtgccgacttgattcctaatctggtaaacaccgtgaaaggatatgcaacacatgagaaggaaacattggaaggagttgttgccgcacgtagccaagcaactcaaattaaagtggacgctgccgatctgacaccagaaaagttggcgcaataccaaaaggcacaaggtgctgtaacatcagcactgggcaagttattagctattaccgagaattatccggacttaaaagctaatcaaaacttcctggaattacaggctcaactggaaggaactgaaaaccgtatcaatgtagcgcgcaaaaatttcaatgatgctgcacaggcttataacaccaatatccgccgtttccccaaaaatatctttgcaggaatgttcggctttgataagaaagcatattttgaagcagaagaaggaagtgagaaggctccgaaggtagaattctaaaaagaggctaaatcgatctttatattttacatttagagatacttagcaatataaataaatctttagctggtgggaaaagaagaaactttcccactatttttatttatatccacctcacattttacaaaagatggcccagataagcatggttttctaatagaaaagtacatttattttccatttaatcacaaatgtcattttacagcattaaatcattatattcgtgatgcaatcttaaagcattcgcttggaaataatcaagtatctgtttcaatagagaatcaattaattatcaaattttcaacaactattttaagtactaatatcgaacactactttatgtcgtcttttttttcacaaaatatttctttgttattctttattccactcaaaaagagtatattcgcactataaatcagaggtcacattttagtaaatacaatataacatgaaatacaaatacgatgtttttataagctattcacgcagagattacgttgatgaaaactacaatgtaatacctggtaatgccatagcggaaatccaaaatgtattcgatgaaaatggtattacctactggttcgataaagacggaatttacagtggacaagagttcattgaaattatcacaggcgcaatagctgaatctaagatgctcatatttatatcctccaaacattcaaatgaatcgatatggactgcgggcgaaatattcgaagctttggatggagaaaaagcaatcattcctgtaaaaatagataattgccagtacaacaaaaaatttaaacttctgatacatccattagattatatcgattatcaagaaaatccccaaaatgcattaaaagatttgctccgtgccattaataaagtcaaagaagatattgcccaaaaacaacgggaagaagaaaagcttagacaagagaaagaggctgaagcaaagaaggaaaagataaaagaagaaatcagcattttggcaaaagactgtcaacgtttgactttacaacaaatagatgtagtcaaccaaatatttgaaaaacaaacatatataggaaatacaaccaagatatgccctatatgtgataaggaagtgtcaatatcttctaatttttgcagcagatgtggttggacttttcctatattatactacattgatggaaatgacacttatcaattggatgagaaacaattgtctgtagcgcgaaccaattggcgtagtataaatatggtgagcgaactgcagaccataaaaagtaatttagaaatcgaaaatcaacgattgcaacgttctcttttgcaggctaccgaagattgcaatagtatgaatgagaatttaaaaaagaatgaatctgccatacaaaaagctaagattgaaatcaagcagatgcaaatcctaaataaagaatcagattctcgaatcaaagaattagagttttccataatagaaagcacaagagaaaatgaaaaaataaaaaatgatttacgcgataaagagaagcgtttattgtgttctatagaagaaaacaaacaattacaaaaacgcctgtccgatgaacaaactaaagctagaaaagtacagaaagaatatgaggatcttttagcagagcaaaaagtcaaaacacaacctcaatcaaagcctatcgtacccaaacaagaagcgccttctgtcaacagatctacaaatatggcatcaggaaattcgtctgtagtaaattcaaataaaaacaaagcattcaagaacaagaatgatgtatttggattggttcgaagtttatgtacaggatctttaataactcttgacaccaatatcatcactgcaggtttacgtatatatcctttaattcaaatcttagataaagattatgaattaacatatagtgagaaagcaatcagtaatctatttaccataggaaatcttgttaatgcaatatgggaaagaaagacttctataattcccaatacacttccgccagctcaaaagaagagaaagttcagttctaaaaatgatgtattcaatttcgttcgccctttctgcaagggaaaactaataacacttaatacaggtttctatgttgcagaaattcagtatgctgatttaagaaaagcattgcttgaaaagtacaatataaacatcagtgaatatagtttaaggtgccatgccacagtcggaaaactgattgattcaatctggagtgaacatataaaatatgcattataatcttggctttacacgcatagccgtatgataatcgaaagtttactccggaatttacctgactgtttttctaggctgtaccaaaaaaaagctgtacttttgcagccgtatacaatataattctataactcatgagtaatcaacgatacatgatgcgtggagtaagcgcatcaaaagaagatgtgcacaacgccatcaagaacatcgacaaaggaatctttccaaaagcgttttgcaaaattatcccggacatattgggaggtgacccggaatattgcaatattatgcatgccgatggtgccggaaccaaatcatctctcgcttatatgtactggaaagaaacgggtgatttgtccgtttggaaaggtattgcgcaggatgcattgattatgaatatcgacgacctgctttgtgtaggtgccgtagacaatatccttgtttcatctactattggacgtaacaaactgttgattcccggagaagtaatctccgccatcatcaacggaacagacgaattgctggccgaactccgtgaaatgggtgtaggcgtatatgcaaccggtggtgaaactgctgatgtcggcgatttggtacgtaccatcatcgttgactctaccgtaacttgccgcatgaaacgttcagacgttatcgacaatgccaatattcgtccgggtgacgtgatcgttggtctggcttcttacggacaagctacttacgagaaagaatacaatggcggtatgggcagtaatggtttaacaagtgcccgccacgacgtattcggaaaatatcttgctgaaaaatatccggaaagctatgatgctgcagttcctgaagagttagtttattccggtaaattaaaactaacagacagcgtggaagattctccaattaatgcaggtaagttagtactctctcctactcgtacatacgcaccggtagtcaaaaaattgcttgatgcattgcgtccggaaatccacggaatggtacactgctccggtggtgcacaaactaaagttctgcattttgtagaaaacgtacgcgtagtaaaagataatcttttccctgttcctcctttattcaaaacgatccaggaacaaagcggtacggactgggcagaaatgtacaaggtattcaatatgggacatcgtcttgaagtctacctgtcaccggaacatgcagaaaaagtgatagctatctccgagtcattcggtatcccggcacagattgtaggacgtgttgaagcatgcgagcaaacagaattaatcattaagagcgaattcggagaatttagatattaaagaatggcagacaatagtaccatactagaaaaattagacggactcgtagcccgttttgaagaaatatctacccttatcacagacccggcagtgattgccgaccagaaacgttatgtcaagttgactaaagaatataaggaattagacgacttgatgaaagcaaggaaagaatatatccaattactgggtaatattgaagaagctaaaaatatccttgccaatgaatcggacgctgaaatgcgcgaaatggcgaaagaagaaatggacaatagtcaagagcgccttccggtattggaagaagaaatcaaactgatgcttgtccctgccgatccgcaagacagcaagaacgctattctcgaaatccgcggaggtgcaggaggcgacgaagcagctatctttgccggcgacctcttccgtatgtatgccaaattctgtgaaaccaaaggttggaaaatggaagtctccaatgcgaacgaagggacagccggtggattcaaagaaattgtttgtagtgtgacaggcgataatgtatacggaattttaaaatacgaatcgggagtacaccgcgtacagcgtgttcctgcgacggaaacgcaaggacgtgttcacacttcagccgcatccgtggccgtgcttcccgaagctgaagaattcgatgtagtcatcaacgaaggagaaatcaaatgggacactttccgaagcggcggtgccggcggacagaatgtaaacaaggtagaatccggagtacgtctgcgctatatctggaagaacccgaacaccggtattgccgaagaaatccttatcgaatgtaccgagacacgcgaccagccgaaaaataaagagcgcgccttggcccgtctccgtacttttatctacgacaaagaacatcagaaatatatcgatgacattgcctccaaacgtaagacaatggtatctaccggagaccgttcagccaaaatacgaacttacaactatccccagggacgtatcaccgaccaccgcatcaactatacaatctataatctggcagccttcatggacggggatatccaggattgtatcgaccatctgatcgtagcggaaaatgcagaacgcctgaaagaaagcgaactttagagaagtggagagttgagaattgagaacggtttcttaaaatagtaaatagtaaattgcaaaatagtaaataacaagatggataagcaacaattatttgaaaacataaagcgcaaaaaatcattcctttgtgtaggacttgatactgatatcaagaaaatcccggaacatctgttgaaagaagaagatccgatctttgcattcaacaaagcaatcattgacgcgacagctgatttgtgtatcgcctacaaacccaatctggctttctatgaaagcatgggtgtaaaaggatggatcgcatttgaaaagacagtaaaatatatcaaagataactatccggatcaattcatcatcgctgacgcaaagcgtggtgacatcggaaatacttctgcaatgtatgcccgcacattctttgaagaattggatatcgactctgtaacagtagccccctacatgggtgaagacagcgttactccgttccttacctacgaaggcaaatgggtgatcctgttggcattgacttccaacaaaggatctcatgacttccaattgacagaagacgtaaacggcgaacgtctgttcgagaaagtattacgcaaatcacaggaatgggctggcgatgaccgcatgatgtatgtggtaggtgctactcaaggacgtgcttttgaggacatccgcaagattgtcccgaaccatttccttctcgtaccaggcgtgggagcacaaggcggttcactcgaagaagtttgcaaatatggtatgaacagtacatgcggattgattgttaactcgtcgcgtggtattatctacgtagataaaacagagaaatttgcagaagctgcccgcaccgccgcacaagaagtgcaagcacaaatggctgaacaactcaaagcaattctctgaaaagggaaaaaggatctctaaagaaaacgaatgccttacgaaagaaagataattaacgaccccgtattcgggttcatcaatattccaaaggggttactgtacgatatagtacggcatccccttttgcagcgtcttacccgcatcaagcaagtaggattatcatctgttgtgtaccccggtgcacaacacacccgcttccaacactccttaggtgcttttcacctgatgagtgaagctatcacccaactggcctccaaaggcaattttatctttgatagtgaagcggaggccgtgcaggctgccatcctgttgcatgatataggacacggccctttctcgcatgtactggaagacacgattgtaaaaggagtctcgcacgaagagatttctcttatgttgatggaacggatgaacaaagagatgaacggccagctgagtcttgccattcaaatcttcaaggacgaatacccgaaacgctttctgcatcaactcgtaagcggtcagttggatatggaccgacttgattatcttcgccgcgacagcttttatacaggcgtaacggaaggtaacatcggctctgcccgaatcatcaaaatgcttgatgtagcggatgaccgtttggttgtcgaatccaaagggatctattctatcgagaatttcctcacggcacgtcgcctgatgtactggcaagtatacctgcataagacgtctgtggcatacgaaaagatgctgattagtactctcttgcgtgccaaagaactggcttcacaaggagtggaactgtttgcatctcctgcattacgttttttcctttacaatgatatcaatccaacggaattctataacaaccccgactgtctggagaattttatccagctggacgacaatgatatatggacagccttgaaagtgtggagcacccacacagataaggtactttccactttaagcacgggaatgataaaccgaaatatctttaaagtggaaatttcgtcggaacctattagtgaggacagaaaaaaagaattaactttgcacatcagccagcaactaggcataaccctttccgaagcgaactattttgtctctacccccagcatcgaaaagaatatgtatgacccggcagatgacagtattgatattatctacaaagacggcactatcaaaaatattgccgaagcatcggacatgctgaacatctcattattgtccaaaaaggtaaagaaatactatctctgctatcagagattacacagataagtataaaatattcatgcaataacacggaaatctgaaaaaaaaatccgttatttgtgaactaattaaattttaaataaaagacatggagttctcggctaagcaaattgcagcatttatccaaggggaaatcattggagacgaaaacgctacggtacacacattcgctaaaattgaagagggaatgcccggagcaatttctttcctgtcaaatcccaaatatacaccttacatctacgaaacacaatcaagcattgtcttggttaataaggacttcactcccgaacacgaaattaaagctactcttatcaaagtagacaatgcatacgaaagtctagctaaattgctcaatctttatgagatgagcaagcctaagaaacaagggatagattcattagctttcgttgcacccagcgccaaaattggtgagaatgtatacatcggtgcttttgcctatatcggtgaaaataccgtgattggagataatactcaaatttacccccacactttcgttggagacggcgtgaagataggcaacagttgcctgctttactccaatgtaaatgtttatcatgactgccgcataggtaatgaatgtatccttcattcgggtgcagtgatcggagctgacggatttggttttgctcccactccgaacggatatgataagattccgcaaatcggaattgttattctggaagataaagtagatataggtgctaatacgtgtgtagaccgtgctacaatgggagctacggtagtacacagcggtgtcaagttagacaatctgatacaaatagcacacaatgatgaaataggttcgcataccgttatggctgcgcaagccggaattgccggttctaccaaagtgggtgaatggtgtatgatcggtggtcaggtaggtattgcaggacatgctaaaataggagataaagttggattaggcgcacaatcaggtgtgccgggagacatcaagtccggtagccagcttatcggaactcctcctatggaactgaagcaatatttcaaatcatccattgcacaaagaagcctgccggatatgcagaaagaactgcgtaacttgcgcaaagaaatagaagaattaaaacaactattaaataagtaaataagtaaccaatgctgaaacaaaaaacgctgaaagatagcttttcactgagcgggaaaggtcttcacactggacttgatctcactgtaacattcaatccagctccggacaatcacggatataaaatccaacgcattgacgtagaaggacaaccaactatcgacgcagtagccgacaatgtaacagaaaccacccgtggtactgtattgtcgaaaaatggagtcaaagtaagcaccattgaacatggtatggcagccctttacgcattgggcattgataactgcctgatccaagttaacggaccggaatttcctattttagatggtagtgcacaatattacgtacaagaaatagaacgtgtaggaacagtagaacaaaatgccgtcaaagacttttatattatcaagtctaaaattgagttccgggatgaaacgactggttcttctattattgtactacctgacgagaatttcagtctgaatgtactggtttcttacgattcgactattatcccgaatcagtttgctacccttgaagatatgcataatttcaaagacgaagtggctgccagccgtactttcgtctttgttcgtgaaatagagccgttgctctccgccggattgattaaaggtggcgacctggacaatgcgatcgtaatctacgaacgcaagatgtcacaggaaagcttcgataagttggcagatgtgatgggagtacctcacatggatgccgatcagttaggctatatcaatcacaaaccgttagtttggcccaatgaatgtgcccgtcacaaactgctggatgtcattggtgacctcgctttaattggcaaaccgattaaaggccgtatcatcgctacccgtccgggacacaccatcaacaataaatttgcccgccagatgcggaaagaaatccgtctgcacgaaatacaggcaccaagttacgactgtaaccgcgagccgataatggatgtaaaccgcatccgcgaattgttaccgcaccgctatcctttccaactggtggacaaagtgattgaaattggtgccaactacattgtaggtattaaaaacatcacagccaacgaacctttcttccagggacattttccacaggagcccgttatgccgggagtacttcaagtggaagcaatggcacaagtcggaggcttgctcgtcttgaattccgtagatgatcctgaacgttattctacctatttcatgaaaatagatggagtgaaattccgtcagaaagtagtgccgggagatacaatcatctttcgtgtagaactgctggcacctatccgccgtggcatttctaccatgaaaggatatgcgtttgtcggcgagaaagttgtttgcgaagcagaattcatggcacaaatagtaaaaaataagtaataattgatatttaaaagcatgataagtcctttagcgtatatccatcccgaagctaagatcggagaaaatgtagaaattgcgccttttgtatttatagataagaacgtagttatcggcgacaacaataaaattatggctaacgccaatattttatacggttcacgtattggtaacggaaacacgatttttccgggtgccgttatcggagccattccgcaggacctcaagtttcgcggtgaagaatcgacagccgaaatcggagataataatctgattcgtgaaaatgtaacaatcaaccgtggtacggcagctaaagggcgcacgattgtgggaaataacaatttattgatggaaggtgtacacgtagcacacgacgcattggttggtaacggatgtatcatcggtaactctaccaagatggcaggcgaaatcgtcattgatgataacgcgattgtcagcgccaatgtattgatgcatcaattctgtcatgtaggcagtcatgtaatgattcagggcggatgccgtttcagtaaagatattcctccttacatcattgcaggacgtgaaccgatcgcttttagcggaatcaatatcatcggcttgcgccgtcgtggcttctccaatgaagtgatcgaaagtattcacaatgcatatcgtatcatctaccaaagtggtttgaacacgacagaagcattgaaaaaaatagaagatgaattcgaaaagagcccggagattgactatatagtcaattttatccgtaattcagaacgtggtattattaaataaacagttcaaaatagtcatattatgatatacagatttactatcatatctgatgaagttgacgattttgtcagagaaatacaaattgatccggaagcaactttttatgacttccatgaagcaatactgaaatcagtagggtacgcaaacgaccagatgacttctttctttatctgcgatgacgactgggaaaaaggaaaagaagtaaccttagaagaaatggacgacaatccggaaatagatagctgggtaatgaaagacactgctatcagtgaactggtagaagacgaaaaacagaaactgctatatgtattcgattacataacagaacgttgtttcttcatcgaactatccgaaattatcaccggaaaagatatgaatggtgccaaatgtaccaagaaatcaggagatgctcctaaacaaacggtagattttgaagaaatgaccgctgcgggaggttctcttgatctggatgaaaacttctatggagaccaggacttcgacatggaagatttcgatcaggaaggatttgacataggtggtgacactagcagcccatacgaagaagaaaaattttaagtattaaatatcaagtattaggtattaattgctatgtagtgtcaggcagttaatacctaatatttttttagtcccgtacgctttaatacttaatacttctatacttaatacttaaaaatctatgcctactctcattgttcttataggtcctacaggtgtggggaaaacggagttgagcctgcgcttggcagaaacatttcagacaagcattgtatctgccgattcgagacagctttatgccgaattaaaaataggcacggcagctcctactcccgaccaactcaaacgtgtcccccatcaactggtcggcacgctccacctcacagactattacagcgctgcccaatacgaaacagaagcactggaaattctggagaaattattcacgcaacacgaagtcgtgattctcactggtggctcaatgatgtatgtagacgctatctgtaagggaattgacgatattcctaccgttgatgcggaaacccgtcaactcatgttacaaaagtatgaagaggaaggccttgaacaactctgcgcagaacttcgcctgttagatccggaatattaccggattgtagatctgaagaatcccaagcgggtgattcatgcgttggagatttgctatatgaccggacgcacttatacttcttttcgcacccaacaaaaaaaacagcgtcctttccgtattctgaaagtcggcctgactcgtgatcgggaagaactttatgaccgtatcaaccgtcgggtagaccagatgatggaggaaggattattggaagaagtacgttccgtacttccctatcgtcacctcaattcactcaatacagtaggctataaagaactgttcaaatatctggacggagaatgggaactctcctttgctatagacaaaatcaagcaaaactcccgcatttattcgcgtaaacagatgacctggttcaaaagagatgaagaaataaaatggttccacccggaacaagaaacggagatactagcgtacctccgtcaatctttataacattatattttgacaatatttagaaacagaagacatctaaaatctactgctattcttcagatgcagttacttttattgttgaagtcactgtatcattaatagcacgaatagaaatttgacgggcttgatattcttctttcactaatagatttacttcaatcactccattctttcccttatcaccataagcagccaatgcagtcttatctttcaatacagatatactcctaatacgatcaggagaaatattcgctaaaggatcatcacctgtagcctctttgccatcaattataaccaaaggtttacctccatcagcagaacgaaacgtagctccccaactctttgccccactatttaatgcatccaaccttgttttattaatgccttcgatttcaatctttctcggcgcaaactttttttccgaatatagttttatatccatcactccatccttagccttttctccataaatcttaatagctttttcaggacctatgacagacacactttcaatacgttcaggattcaaagcatttactacttcacgttcagactctttcccattaataataaccaaaggttttccttcaccggaaattccttgtaccgaaatagccaccttctttttcccggatgttaagacagaatcttttttttctgtacgataacctaccactactaccttattcttggtagtatcaataggctccttaacaacattttcttcactctttttttccacaatttccgccaaatcattaactttgactgcagaaatctcttccactttttcagagatttcaggacgggcaaaagcagttactgcaatagctgccaacggaagtacatacaagtacttcaaccgtgcccacggattcgatttttcttttaacatcatagtgatacgttttttaagtttactgtgattaaagctgttggccatagagtagagccttgtgccaacggctttttttattaataatagttgatattctttcgcgtttacaccctcattaatgacggtctcgtccgcttcatactcatgaatgttctgcaactcttgtttcaacaaccatgcaccaggattgaaccattggaaaaagatgcaaatatccgccaccaataaatctactgaatggcgatggtgaatatgagccatttcatgaataaggatttccctcccgttttcctccaagtctttccggctgatgacaatatacttcatccaactgaacggaactatctcctgattatgcaccacaagtgtaacccctttctccaacttctcatgtttgccggaatgtaccaaccgaaagagacaaatcaaagaatagatattgcgacaggcaagaaacagaatacccgcccaatagaccaacagaacaatctgtacccaagatatggccgacgtctcctgcactgcaccgacattggcaggagtagtctccaactctgccatcaatagcaattgttcaatggaaagcacagcctgctgcacttcaacctgatgccgggtagttacttcgatacaaggaatgagtaatgaaaagaacaacactcccaataaagccatacgattgaaacgatgaaaggtttccttgctaagtaataaccggaaaaacaggtaaaacagaacaagacaaacagatgattttaatatataaatgaagaaaactcccatagcatagattttcgtttaatagattagtgttttttgtcagcctgttccacttcctcgatgagctgtttcaattcatccaaggaaatatcttcctccttaaccaaagaagaaacggcattcaggtaagaattattaaaatacttactaatcacattccgcagcgttcctttacgaaaatcttcttcactaactacgggataatattgataggtatttccgaaagtataatgagctagaaaacctttttcttccaacccacgcacaatcgtagataatgtattgaaatgtggcttgggatcttcatagaaagccaacatttccttcacgaacaagggacctttttcccagaaaaagcccatgatttcttcttcttttgctgttaatcctttcatatctgcaactttgtttgctgcaaataacgaaaagttttagttcataaactaatttatctagttaaagtaaactaaaagctatagttaagacgaagaatctactattaaacacctgtgaaacagatttattacatctcttttagctccacagtttattgactataaagttgccgataaagaacaagtcgcccataaaaataatgctgaataccagaaaagtgaaacaagtactccaccgggctcctccctcctcttcgccacgtttgatacgaagcagggaactatgtaaacaatcacctgctatgaacagtacaaataaactcggtatcaagtcaccccatgacaccaaccacagattatcacccttccccatcaggaacgtcaatgccacggccaataagaagacagaagcatattgcaagtcttttctttttgaattcatagtggtaatgtttaaagtccttttcacaaagatattgaatctcacccaataatccttatcaaatctatataaaaatcggtcaggctttgttgaatctaagtttattgttacttttgcaagtacgaattaaaaccaaaaccgattataaacgcagatgaaaaagatcagcatcactttattactctgccttctctgtctgaccggaatggcacaaggacaaaaggcactcgatttaaaagatattacttccggacgtttccgcccggaaaatattcagagagtaatccctatgcctgatggtgaacactacacacagatgaacgctgacggcacgcaaatcattaaatactctttcaagacaggtgagaaagtagaagtgattttcgatgtaaatactacacgcgaatgtgacttcaagaacttcgacagttatcagttctctcccgacggtcagaaattgctgattgctactaaaacaacacctatttataggcattcatacacagctgtacattacatttaccctttgaaacgaaatgataagggcgttacgacaaacaacattattgaacggctgtctgacggtggacctcaacaggtccccgtcttttctccggacggtaccatgattgcatttgtacgcaacaataacatatttcttgttaagttgctttacggcaacagcgaaagccaggtcacagaagatggcaaacagaattcggtaatcaacggtattcctgactgggtgtatgaagaagagttcggcttcgaccgtgctttggaattcagcgccgacaatacgctgattgcttttatccgtttcgacgagtcggaagttccctcctactctttcccggtatttgccggacaagcaccccgcattgatgctttaaaagattatccgggcgaatatacatacaagtatccgaaagccggatatccgaattcgaaagtagaggtacgcacgtatgacatcaaatcacatgtcacccgtacaatgaaactcccattggatgcagatggatacattccgcgtatccgtttcacaaaggatgccaataaattggctatcatgacattgaaccgccatcaagaccgttttgatctttactttgccgatcctcgttccacactttgcaaactaatgcttcgcgatgagtctccttattatatcaaggagaatattttcgataatatccagttctatccggaatacttcagcctgcttagcgaacgtgacggttacagtcacctctattggtatagcatgggggggaatctgattaaaaaggttactaacggtaagtttgaggtgaaagattttctgggatatgatgaagaagacggttctttctattacaccagcaatgaagaaagccctctgcgcaaagctgtctataaaatagacaagaagggcaagaagctcaaactatcccaacaggtaggaaccaatacaccgctcttcagcaaatcgatgaagtattacatgaacaagttctccaacttgaatactccgatgctggttacactgaatgataattcgggcaaaacactcaaaacgcttattaccaatgacggattgaaacaaacattgtctggatatgctgtgccacaaaaagagttcttcactttccaaaccacagatggcgtgaagttgaacggctggatgatgaaaccggttaatttctccgcatccaaaaaatatccggtactgatgtatcaatatagtggcccgggttcccaacaggtattggatacttggggaatcagctgggagacatacatggcaagcctcggttatatcgtggtatgtgtagatggtcgtggcactggaggtcgtggagaagcttttgagaaatgtacctatttaaaaattggcgtcaaagaagccaaagaccaggtggaaacagcgctttacctaggcaaacaaacgtatgtggacaaagaccgcatcggtatctggggttggagttatggcggatacatgactcttatgagcatgagcgaaggaactcccgtattcaaagccggagtagcagtagccgcaccgaccgactggcgtttctatgatacgatttacaccgaacgcttcatgcgcactcccaaagaaaatgcggaaggatataaggaatcatcagccttcacccgtgccgacaaacttcatggcaacttgttgctggtacatggtatggcagatgacaatgttcacttccagaactgtgcagaatatgccgaacagttagttcagcttggaaaacaatttgatatgcaagtgtacacgaaccgtaatcatggaatatatggtggcaacacccgccaacacttgtacacacggttgaccaacttcttcttgaacaacttataatgacggatagagtacgtaagcccgaatggctgaaaattaatatcggtgccaacgaacgatacaccgaaacaaagcgaattgtcgactcccactgcttgcacacgatatgcagcagtgggcgttgccctaatatgggggaatgttggggaaaaggaacagccaccttcatgattggcggtgacatctgcacgcgtagctgtaaattttgcaacacacagacaggacgtccccatccgttagatgcaaacgagcctacccatgtagcagaatccatcgcactgatgaaattggatcatgccgtcatcacctctgtagaccgggatgatttacctgatttgggtgcagagcattgggcacgtaccatccgggagataaaacggttgaatccacagacaaccattgaagtactgattccggattttcaaggcagaatggagttggtagatttagtaattgacgcccggcccgacatcatatcacacaatatggaaactgtgcgccgcattagtccactagtccgcagtgcagcaaattatgatacaagcttacaggttatcagacatatttccgaaaagggagtcaaatctaaaagcggcataatggtcggactgggtgaaactccggaggaagtcgaaacattgatggacgatctgctagcaaccggttgccagattcttaccatagggcaatacctgcaaccgagtcatcggcattatcccgttgtggcatacatcactccgctgcaattcatgaaatataaaacagttggtttagagaaaggattcaacatcgtagagagtgctccccttgttcgttcctcctaccatgcagagaaacatattcgttagcaaacaaaacacatacactatttgttttatagatagaaccgacaaataaacataaatatagagatggatcataaaggaatactttcttccgcatttaacatgtcgctgggttttatccccgttattatttccattttattgtgtgaacttataacgcaagacacggctatttacatcggtacaggtataggtattataggaatatacctttcttatcgacgtaaaggattgttaattcctaattttatcctctatatagcgaccggagtgctggcactattatccgtagcagctctcattcctggtgattatgttccccccggtgcgctcccgcttactctggaagtcagtattctcattccaatgctaagtctttatatgcataagaaaaggtttatcaaccacttcttaaaacagataggttcttgcaacaaacgtttatatgctcagggagcagaagccgccgttgtatctgctcgcattgccttgattttcggaatactgcattttattataatcagcatcaccgtcattttccaaaacccactaagtaagacaagtctgtttgtactctataaagtgttacctcctactgtctttcttatgagcatcctgttcaaccagatcgctatccgtttcttcaatcacctaatgtctcacacagaatatgttcctattgtgaataccaaaggagacgtgatcgggaaaacccctgcgatagaagctgttaattataagaacgcatacatcaatccggtgataagaattgccatatccactcatggaatgctgttcctttgcgacagaccgtcaacagccattttggacaaaggaaaagtggacattcccatggaatgttatctccgatatggagaatctttagaggcgggtgccacccgtttgattaacaatgctttcccgcacgaaaaagatatcaagccagagttcaatatcgtttatcactttgagaatgaagtaaccaatcgtcttatctacttattcatcgttgatatcaaggatgattccatcctttgtacccctcgctttaagaacagtaagctatggagcttcaaacagatagaggaaaacttgggaaaaggcttcttcagtagctgtttcgaagatgaatatgaacacctaaaagacgttatttatataagagaaaaatacagggaatcttagacaattcaggcacatgtcccttccagtccttcacagtacgcgtctgtatatactctccttcacatgtaatatcggcagcaatacaaagctttgtttgaggacgacagtttaacaaaatatcttctatcatcttatgattccggtaaggcgtctcaatgaaaagttgtgtctgattttcagcatacacacgctgctccaatgttttcagtttcttggcacgttcccccggttcaatcggcagataaccatgaaacgcaaagctctgcccgttaaagcccgaagccatcacggaaagaataattgaagagggtccaaccaaaggaactaccttcagttttttacgttgtgcgatggcaaccacatccgctcccggatcagctaccgccggacaaccggcttcggagataactcccattgaagctccgcctaccaaaggttgcagataaccggaaatatcttcaggtgaagtatgtttgttcaacggataaaatgtcaacgcatcaatatcaatctcccggtccacctttttcaggaaacgacgggcagaacgaacatcttcgactataaaataccggataccggaaataatttccttattataagaaggcaacaccttttcaataggtgtatcgcctaaagtcacgggcaacaaataaagggcagtttccacttattaaattgagaattgaaaattaaaaattgagaaataagaaagagaaacgattcaggaagccaggtagttagattcacttaacatttcgtggtaatcagtaaattccagaagatctttcagcttcatatccttatgctttttcatgtaagaagcaatgattcttgctcccatccatgtacctatcaatgccggagcttgagcacccaacatatcaacagcaggagcaggcttcatataatagcggatcaccatcgggtcacgagcatgcagatgatcgttggtacagatataattccatatctccttttcattatccttgcaccagtcgctttcctccttagaataccccattgcttcaccaatatcactatatcccaataagttttgcactacgtaattgatcttccccgtatgcatcatcaagtcaatcaaacaagtaccctcatgatagttcattccataacggctcaaaagataaaaagcaaaacaatccggcacaatccgttccggacgcatcgagcgacattgataatcgtaatagaaacgcttataaagaggataatcttcccccatatatttatcaagactgattcccaataaagaatccactaaaataatagattcgttgaaagcggatacttgcgaatagataaacggcactttcgtatcaggcacttcctttttcagtttccgaaatcctttgctaagtcctttttccacttcatccagattaggatattttgcttctacatcgctaagcaaacgaaccaaagtcgtatccgaatagaatttttgcagacgttgcgagatggtatcatctttcactgtaccgatagacaatacatcctcaatcaggattctcgtcggcatacggtagtccatcgtcaacttctgcatagcagaaaaactgttggagcgaacatattcgctcaacagcttatcatatctcagaacagaaatctcttcttccttctgctccgtaccctttcctgtgcttatcccgcaggaggcgaaaagcatactcattaaaataataagaagagagatccgtagtttcatatttttttatccgtaaatgatgttaccattttcgtccatatactcatcgagtcctttctcgtaagtagccatggcacgaagactcatacctacactggagaatccaccgtcatggaataagttctgcatagttaccttacgggtaagatcggagaacatcacgatgcaataatcggcacattcgtcagccgtagcatttccgagaggagacatacggttggagaaatcaaacagtttatccatacccttcacgcccgaaccggcagtagtaaatgtaggagactgcgagatagtattcacacgtacgctatgttcgcgtccgtagatgtaaccaaagctacgtgcaatagattccagcaatgcctttgcatctgccatatcattgtagccgtagaaagtacgctgcgcggccacgtagctcaaagcaacgatagaaccgtaatcagcaatagcgttcaatttcttggccgactgaatcattttatggaatgaaacagctgaaatatccaatgtcttatccaacattccatagtcaaggtcatcgtaagtacgttttttgcgcacgttgggagacataccgatagagtggagtacaaaatcaatttgtccacccagtatatccatggaggtcttgaatacattttgcaaatcttctacactggtggcatctgccggaataacctggcaatttaatttctgggccaaagcgtcgacttctcccatacggatagccatcggagtatttgataatgtaatagttgcaccttcttctacggcacgctctgctactttccaggcaatagactgatcgttcaaagcaccgaagataatacctctttttcctttcaacaagttataactcatatcttttaatagttaaattttgtgcaaagataggaactttctgcataaaaacacgagaagtgtgcaaataatagacagaaatgacaaaaaatacacgtattctatcaattagtccacatcctcttggggtttgccacctatctttgcaatcgataattaagaggttttttcataatatttatttaaggttagaattaggttaacatgaatttgtcttattcctctcctgcaggctgcctgcgacagatcgcctgcggaaggacataagaattatgaaatcgccctcattaatcatcacccaattaccaagaaaaacaatagatgtataaccctatagaaataagttactaaatgaacacattgacaaaaagactcttctggatggccctatgctgtttaccgtttatctcatcaggatgtaaacaaagcgagactaccgtaaaagaaagctccatcagtgacgctctttaccagaatttaccttttgaaatgccgaaagtacagcaaccggttttccctgcttacgaagtaaacattgagaaattcggagccaaaggagacggtctgttcctgaataccaaagctatcaacgatgctattaaagacgtgaatcaacgcggagggggtaaagtgattatcccggaaggtgtctggttgactggtccgatcgagctgttgagcaatgtaaatctatatacggaacaaaatgcgctggtactttttaccggtgattttgaagcatatcctatcattgccacttctttcgaaggactcgagactcgtcgttgccaatcaccgatttcagtacgcaatgcagaaaatatagctatcaccggacatggtacatttgacggaaacggtgactgctggcgtccggtaaaaaaaggaaagctgactgcttcacaatggaaaaagctggtaaactcgggaggtgttctcgacgagaaacaagagatatggtatcccactgccggctcactgagaggtgcaatggcttgcaaagacttcaatgtccccgaaggtatcaacacagatgaagaatgggctgaaatccgtccatggttacgtccggtgttgttaagcatcgtcaaaagcaagaaggtgctgttggaaggagttactttcaaaaactcaccaagctggtgtctgcaccccttgtcttgcgaagatttcacagtaaataatatcatggtcatcaacccctggtattctcaaaacggtgatgctatcgacttggaatcttgtaaaaacgctctaattatcaatagtgtgtttgatgcgggagatgatgccatctgtatcaaatccggtaaagacgaagatggacgccgtcgtggagaaccttgccagaacgttatcgtgaaaaacaatacagtattgcacggacatggcggattcgtggtaggtagtgaaatgtccggcggtgtgaagaatatctatgtagaggactgcacatttatgggtacagatgtaggtttacgtttcaagagtacccgcggacgtggcggtgtggtagaaaacatctacattaacaatatcaatatgattaatattccgaatgaacccttattgttcgacttgttctacggtggaaaaggtgccggtgaagaatcggaagaagatctgttgagccgtatgaaaactgccattcctccggtgacagaagaaacaccagctttccgcaatattcatatttccaatattgtttgcagaggttcgggacgtgccatgttcttcaacggactgccggaaatgcccatcagcaatattaccgttaaaaacgttgtgatgacggaagctgcggatggagttgttatcagtcaggtagacggagttactttggaaaatatttatgtagaatcttctaaaggtaacaatatattaaacgttaagaatgccaagaatctgactatagacggaaaggtatatgaggaattaggtgcaaaagaggagattttaagtctcaaataaaaactcattgccattctgtgatgcaaaatagaaaccacaatatcattatatagagtaaaaagctcaaatagcagactataatctcctcaaaagagacacagtctgctattttttctgctatttttgcaaggagaaatacgacgtataatttcagccttagaaacatgaagaagaatctttttattattactttctttttaggagctttcagcctgtctgcccaaacgcagaaacaggagaaaaccatcacagttgaagtacaaaacaactggaatcagcccaaagcggatgctccggttgttatcaatctacatgagttgcacgctggtttcaaagtaaaatcagccgttgtcatggaaggaaggaaggaaattccttcgcagttggacgatttgaaccgggaccgcaagatggacgaactggtctttgttgccgatcttcctgcccatggtagaaaaacatttcaggttacactttcttcggaaaagagtacaaagacttatcctgaacgagtttatgccgatatgtttattgtagacaacaagaaaggtaaacatcaacgggtacaggctatcaccgttcccggcactagcaatatatacagcatggtacgtcctcacggtccggttttggaatcggaactggtaggataccgtctttatttcaatgaaaaacagacaccggatatttacggcaagttcaacaaaggactggaaatcaaagaatcgcagttctatccgacggatgagcagttagctaaaggattcggagatgacgtacttcgcgtgttcgacagttgcggaccgggtgcattgaaaggttgggacggacaaaaggcaacccatattactccagtggacactcgtacagaacgtatcgtctcttatggaccggtacgtgtaattgcagaaatagaagtaaccggatggaaatatcaggaccaggaactgaatatgatgacacgctacacgctttatgccggacatcgcgatcttcatatcgaagcattctttgacgaaccgctcgataaagaaattttctgcacaggtgtgcaagacatcgtaggtacttccaaatctttctccgatcataaaggactcgtaggaagttggggaacggactggccggtaaacgataccgtaaaatatgctaaagaaactgtagggctgggcacttgtattccccaacgttatgtaaaatcggaagaaaaggataaagccaacttcctttatacaattaccgccccgggaaataaatatttccagtatcacacgactttcacctcgatgaaagagacattcggatataaaacgccggaagcatggtttgctcatctccgcgaatggaaagaagagctggctcatccggtgacagtgagaataaaagataaccgccccaataaatagggtagaaacaaatacaactaaacaaaaattacgaggtatctaccaatttttctatgactctgcacaaatattcctccttgtgcagagtctttttatttacctttgccatcagataaaaccaacgaatcatatctataaataatctatctataacatgaaacgattgacacagactttagccttttgcttattaacggttttcaccgcagtagcacagaagaactatgtatctgaagtatgggtttccgacctcggaaacggtaaatacaaaaatccggtgctttatgccgactattccgatccggatgcttgccgtgtaggagatgatttctatatgacttcatccagtttcaactgtttgccgggattgcaaatccttcattctaaagatttagtcaactggacaatcatcggtgccgcagttcccaatgccctctcccctatcgaaactccggaacggccggaacacggcaatcgtgtatgggctccggctattcgtcatcacaacggtgagttttacatcttttggggagatcccgatcagggagcttttatggtgaaagccaaagatccgaaaggtccgtggagcgaaccggtcttggtgaaagcgggaaaaggtatcattgacacttgcccgttctgggatgaagacggaaaagtatatatggtacacgcatacgcaggaagtcgtgccggactgaaaagtgtaatcactatctgcgaactgaatgcagaagcaacaaaagcgatcactccttcccgtataattttcgacggtcacgaagcacatcagacttgcgaaggtcctaaaatgtacaagagaaacgactattattatatctttcatccggccggcggtgtgccgacaggctggcaggtcgtattacgttctaaaaacatctacggtccttacgaatggaaaacagtacttgcgcaaggtaactctcctgtcaacggtcctcaccaaggtgcatgggtagatactcctaccggagaagactggttcctccactttcaagatgtcggtgcttacggacgcattatgcatctccaaccgatgaaatgggtgaacgactggcctattatcggtattgataaagacggtgacggctgcggagaacctgttttgacttacaagaagccaaatgtcggtaaaacatatcctatctgcactccacaagaaagtgacgaatttgatgggtatacactttctccgcagtggcaatggcatgctaacattaatgaaaaatgggcgtattatgcaggtgacaaaagctatgtcagattatactcttatccggtagtagaagattataagaacctgtgggatgtagccaacctcttattacaaaaaactccttctgataattttaccgcaacaatgaaactgacgttcagccctaaccaaaagaataaaggcgaacgcactggacttgtcgttatgggcagggattatgccggacttgttctagaaaatacagacaaaggtttggttctgtcgcaagttgaatgtgacagagcagataaaggcaaaccagaagaagtgaaagccgctgttgatctttcgcaaaacacggtttatctgaaagtgcgtttcagttgtgacggaaagaaaatcaagggtagtgaaggcggacatgacctcattgtgatgtgtaatttcagctatagcctcgacggaaagaaatatgaatcattaggtgttcctttccaggcaagagaaggacaatggattggtgccaaagtcggtatgttctgtacgcgtccggctattaaaacgaatgacggcggttgggcagacgttgactggttccgtattacgaagaagtaatcaaagtatatataaggatgaaaaaagattgtcccacaactttcaagcagtagcgggacaatcttttttatcttctttaaacttacatacaagcccagccaaatttacgaacaagctctgcaagcagactacggtcttttattggcaaattaatgaccacattctcgcgcttctctccagataaaacatatccctcagccggcaatttatcttccaacaatacactttcctttaataacgttttctggtattcacccgattgaaacacaacatcgtaatactcatgttcattttcaggctgtagatagagtaaacgcaaatcggctttacctgctaagaaggattcaagtctacgtgtagagatacgtattcccgtatagcgataaaccgtctcatcatcatataaaagacaaagatacagtgtatcaaaggcatctcttgccacaaaaagctgaggcacatcacagaaatccagaattttgtctatccttaacacatcttccattcccataatcagactattttagcttgtaaaacattaaaatcctttgttctccaccaagaataatgtgctatatcaaatgttttctttaacactccatcttttggttccaatatgactaaagcaatatttgccttcttgaacttaggaagctttaatcttttctccgcttcttccctctctgaaaatagagagactgcccttgtcacacattcatctattcctaatcctttaaagaccttatccggctgcatttttctttgcgaaaagaaatcttctgttgtaacaggattaccatttgcaattctataataacagccttcgcaccgcttcgcatctgttgggggacattgttcaggcaatgcctcaaaccattctgcattcattattctttagtttttcgcaaagttaagccaatctggtagaataacaaatatatttccggctttgttgttcattcgatattctctaaactattgcctcattcttcccaatctcatttttttagtatacctttgcagaataaaagatttaaatatagaattaactataaacataagccttaatgaaaaaactaataatattcgatttggacggtacattattaaatactatcgcagacctcgcccatagcactaattatgctttgaataaattaggataccccacacacgatgtagaaaagtataacttcatggtaggaaatggtatcaacaaactctttgaacgtgcattacccgaaggagaaaagacagaagagaatgtgctccgggtaagaaaagagtttattccttattatgatattcacaatgcagacgatagtcgtccttacccgggtatttcagcgttattgtcttatctgcaatccgcaggcattcagattgccgtagcctccaacaaatatcaggccgctaccgagaaactggttgcccactactttccggaaattcatttcactgccgttttcggccaacgggaaggagtaaatgtcaaacctgatccaacaatcgtttttgatatattaaaacttgccgatgtacgaaaagaagatgttctttatgtaggtgattccggtgtagacatgcaaacagcagccaatgccggtgtaaccgcttgcggagtgacatggggattccgaccacgcacggaactagaagaatttaatccggcatatatgacagatgtggccgaaaaaataaaaaaaatggtcttttaacgatgatatccttacaagaataattatgattcggcaagtaaaacttcaatagtctcaataagttctcttgccggagcttttatcgtactgatttcatcctccgatattgaataaatgcaattataatcccctttttgccgtaattgttccatacgcgccaaaaaacttcccaaacgtgcactaattttgcctgtttttataaaattcaagccaaagcaagctatcaacccatcatgggttttacatgataatccattttgtattaataaagcctgaacagcatgaaaacaggcataataatatctattggaagcaatatcccaatacttcagatcaaacatctcatctgcttgtttcaaaaatactttagctttctccaactgtaatatcaccaaagaattacgttcttcatctgtcaatttcatactaattcaattccttcctgctctacatttttataaaatggtgtaatacaacttgcagcccattctttcatcgtatacataatcggattaattcgcgctcccaagtcccatcccaacatagttaagggaaagcttaccttatcataatcttcaggctccaatttttctttatctaagataatcaaaatatcccaatcagaatcaatccgtgcatccccacgagcttgagaaccaaacaacaaagccttgccaccttttggtaaatgctctgtcaatgcctgcttaatagactctaatattttatttgtatgacttttcatattcgtctccccttactcttctacaaatatacaataaatatcaatacaacaatatgacttacaaaaaaatcgctcttgctaattattcatacttggttcttatccatgactaatatgaataaagaataaagtctaatattacatattttccgtacaaatttcaatatcactttccttacaatgcattttctttgcaacaggtaaagaaaggctcacctttgtgtgcctaaatctaagaacaatagtaatctaatttattataaaatgaaaaagcatcttatactattttttgcaggagtaatattgagttacgggaacataaaagcacagacagttcccgataaaaaagaaattctgaaagtaactcttcatgtgaacgactatttcatgaagaaatatgccaactatcgcactccttcctttgtgaaaaaagtagttcgccccagtaatatctggacacgaagcgtatattacgaaggcttaatggcactctactccatctatcccgcagacgaatattatctctatgccaaagaatgggcggattaccaccaatggggcttccaccgtgggacaaccacccgtaatgcagataattactgcgccagccaaatctatctcgatttatacaacatttgccccgatcctgaaaaaatacggaaaacgaaagccaatatggatatgctggtcaatactccacaaataaacgactggtggtggatagatgctatccagatggggatgcctatatttgccaaaatggggaaacttacaggcgaacagaagtacttcgacaaaatgtgggatatgtacgaatatacccgtaataaacacggagagaacggaatgttcaatgtcaaagaaggtttgtggtggagagaccataatttcgatcctccatacaaagagcctaatggcgaaaactgttattggagccgtggtaacggatgggtatacgcagctttggtgcgggtaatgaacgaaattccatctgatgaaaaacatcgccaagattacatcaatgattttatggctatgagcaaagcactgaaacaatgccagcgtgaagatggcttttggaatgtcagcctccacgatccgtcaaacttcggaggcaaagagacttccggcacagctcttttcgtatatggtatggcttggggcgtacgcaacggtctattggataaaaagacctatctgcctgtaatcataaaagcatggaatgctatggtgaaggatgcagttcacccgaatggttttcttggttatgtacagggaaccggcaaagaaccgaaagacagtcaacctgtcacatacgacaaagttcctgattttgaggatttcggaacaggatgtttccttcttgccggaagtgaaatctataaattagacctcaatatgtaactgataaacatacttatcttgaatccggtctatccttcacaaaccggattcaaggtaagtatatactacgttttacttctctcccctttctggtaagccgaaggagatactccaaactgcgctttaaaacatttactgaaataaagaggatcgttaatacccactttataagaaacttccgcaacagtcagatccctttcggtcaaaaacagttcggcagccttcttcattcgtacgacacgcaaatactcattcggtgagtatcctgtcactccgcgtaattttttataaaacacagttcgtcccatccccatcatctgcgcaaattcatcaatagaaatgttgtattgagaataaatcttttccaccacagccaccaactgatctgcaaactccttatcccggtccgtgttacataaagcaggacgcactacccccggttcactggaaaacttcttccgtaacttttcgcattgctctatcagccggaacacctgcgcaagcaaaagcttaaaactaaatggctttgtaacataaacatccgctcccgcttcaagtccttccaggtgcttatccggtgaagtcaaggcagtcagcagaataataggaatatgacttgtcgcaaattcagttttcagtttctttgtcacttcgaaaccggtcatcccaggcatcaatacatcgcagataatcaagtctgcgtcatagttgcatgccttttcaaatccggatattccatccgcagccacttctacttcaaaataagcactaagctcctcctgcaggaacccacgaatatcattatcgtcttcgatgactaatattttatgttttcttgatgtggtgactgtcttttcatgttcctgacattcctctgaaagctcctgcaaatggtgagtctgcatattcgcttcttccaacaggagattgccgggaaccaggaagtctttttccgaataaacagttttatcagtcggaatacataccgtaaatacggaacctcccccttcattatctttatattcaatcgttcccttatgcacctgcaccaattcatggctcaaatgcaaccctactccaatgctatctccggagaaactactttgcatgaaacgtttaaacaattctccctgcttttctttaggaatacctactccggtatccgctacctgaatgtataaacacttcttcacctcatccacattcacagaaaacagaattgtcccacccgaaggagtatacttaaaagcatttgaaagtaagttatacaccaccttatccaaattacctttatcaataaacattttataggatggcacagacggcaaaaagcggaaatccatattcttctgttctgctacgtcactgaaacttaaatatatttcgtacaggaaagcaactacatcagtttcctgcagagaaagagccaacttgttgttctgcatttttctgaactccagcaactgattaatcagcctcaacatacgttgtgtacttttatccatgactttcaacggatgcaataaggcttgtggaatatcatccatccggtacattttctccaatgctccttggatcaatgtaagcggagtacggaattcatgagagatatttgtgaaaaataccagtttatactctgtcagttgtttttcaacattgatgcggttgcgcaacctattgaaattaaaaatgatacgatatgtaaagtacaaagctattaacatcaggatgaaatatccaagcatagcccaatttgttttccaaaacggaggcacgataacaatcttcaaagttgtttcggtatcattccaaataccggcaccatcacaatatttcacatggaaaatgtaactgcccggctccagatatttataagtggcaaaacttaacgaagacggaacattccatcccttgtcatagttttccagccaatacatatacttgatttgaccattatccgaataatcgagagtagaaaaatcaagcataaaagaattctggaaatatttcaatgtaatcttatccgaataggctaaagattcttgcaaaggagaacccggcatattaggcttcacctgaattccattaacggacaatcctgtgataacaataggagaaagcaatctctctgttggaatcttcttcgggtcaataatcgtcaatccgtagtttgttccaaaaatcagtttaccgtctgcccccatacacgcactgtcctcgctatacacatttcctaatgtataagatgagaagaaataattctcgaaagaatggctgttgggattgaaccttgaaattccatattccgtagcaatccataattgtcccgaatgatcttccaaaatagattgcaccatattattaaccagtccttccgctattccataatgtgtatatttcaaagactgacagtcgtctgacagttcgcatagattcagcccggcacccgaagttcctacccacatgcgccctttgctatcacgaaacaggcaacgaatctcattgctgcaaaaattgccatcggtgtagctgaacaaatgatagttatcttcattagcgatcaatgagtcagggtggaaaatgcagataccttcacttgtgcccatccatatcatccctttctcatcttctgccattactctgactatccgtaagccatacttctttccttgaaagaaacgacggaacttgtattgtcctttttccgttgattctgccagatccagtcctcctccaaatgtccccacccacatacgatctttcttatcgcgaagaatggaataaatattagaatgagataaggcaaaaggattagacggatccgttttataccacgtatctcctatttttagtccgtctccccgggttcctatccatatattctcctgactatcttctgaaatcgcataaatattatagggcaaataatgattatctatcttagttttcagatgagaatcataattatacaatccacctcttcgcgttcctacccatatatctccattcgacattttagtcagtaaccggattgtattcgaacgatcaaaaacatccggcgattctggatagacatgtgtaatgcctttatttgaaatggaaatatgagacaaaccggaatattcggagcttacccatattcctcctgttctgtctttcatcaaacataacaaaaaatctgaccctataggtcctgcattcttcccttcggaaacaaagtgttccaaccgatcttcctgaatatcgtaggtgaaaagtccgtttccataagttgaaatccacacaatcccccggtcatcacgcaccacatgatagcgttcataatctatatatttcatcttctcttcaggaatcagttgaaaattctttatttctccgctcttcgagtttatgtaataaattcgtccagtgttattgtaagcccaacaatctccataattgtcatgaataacttttccattatttattttcaattcccggcaaggagttatttgaaaattctgaaaatcaaattcatataccccttcgctagaagtaaatataacccatttatcttttatcaatgaatgtgtactgacagatgtattaccggcaatagcagacagcgacgctaaacagtctatttttttcgatccatttacacaacgatacacatctccactctttgtcagaaaatacatatcctctccatgagggaaagaagaagaaaaattcaatttcctatcgataaattcaactttccctttataaacagacgcaagtccctgcatggtaccaatccagatcctgccactaaaatcttcatttataaatttaatccggtcatcgggcaggtttccaaatttcgttctaaacttcacagaggtcatagtccgatcgtcctcacaaacaatttgacgtacaccattccttctatgccaaagccacacatttccattagaggacataaatatttctgaatagttctctccatcacttccggtaccggtaaaatctacaaaacaagctttctgtagatcataacagctgaataattccggcacagtctttatccacaaaaaaccattcttatcctctgccacatgttttattctgttatctgctaaagaaatccgatcgtgtttcccgctttccaactgataagtaagaaaagtatttccatcataacgggtcaatccgtctaaagtacccaaccataagaaccctttactgtcctgaaacatgcatcgtacagaattactaggtagcccatcactggttctcatttgtttggaactaagttcaatatcagcatacaaatccgataaagaaaaacttaacaaaacgaagaggcataataatttatatttcatatagtggttggggttattttgattgctggttacaaagatacatcttttcatagtttttttaagatttatacaagcaaaactaaccaaaaggaagaataaatacaaaaaacttagcagtctatttcgaaacaaggattattatccatatttatgtcattttttccatatactgaccaatgatttgcattggttcataatcggtacggttttgaacaattcaatgcttttctctataacatggtcaattcttccatctcctttacttttctctgtttcttcgataaataaggagtttgcaggtggaatgtctttattctaaaaaggttgtcatctaaaaaaataagaacaagtgaagcaaattctgtatttcaagataaatccttatatttgtatcaaattcgtctgatataaaagttgaatatgataaaaacaatgaataagccacttacatacgatgatatacctaaaatgtatctgttttgcaaccacaccaaatgtccgcgccgcaacaaatgcctccgttttcaggctgcgatgattgtgccccaaagtgttcctcactacgaagcgatcaacatcaaccatgtagcggggaatgaaaaggaatgttcctatttcagtgcatacactctcacgacctttgcacttggcatcagccatatattagacgacgttccgcacaaaaaagctatggccatacaaaacagccttaaatctttaatggggaaaagcatgtactaccgtattcgcaacaaacaacgtcgacttcatccatcggaacagaaacaaatcgcagacgttttcctggaacacggcatcaagacaaagattaacttcgacgaatacattgaagattatgactggtaagccacagattgtgacgggaaagatacttgcgaaaatatttcataggaattgaataaaagtttcataacgataaaaaaaaagttccatagaaatgaaaaaaaagtttcatcgtgatggaaataaagtttcacgacgatgaaacctgtgaaacttttagcacaaataaagattaacaggcaagcgaagacctaaaggttacacatgcgtcatattccccttataataagaagcctccgcagacgcccgtccaaatgttcaagcataaatattaaaaaaaatcggataccatatttaggcttctgatgcattttcgcaatccgctctggacgccagcttctccagtgccaccaattcccatcccttgaacaccagcgtaatcaatccaagccgggtattccctttcgtgcgggccaccttcccatcatcggcatagcggcgcaactgttctgccgcatcacgtttcagcaaggcgatgtcggcatcggaggtgtcacgccgggcatacttcacctccacgatatagctgtagactatgtccggctggcgcaccagatcgggcatcatgtagaaatccgcataacctttggaagattcgtattcgggaagaaggatgtagccctgcgtcaaccctaagtaagccagcaggaatcccttgacgtgcgcctcgccgtcgataaattcacggatggcattttgccgatgaatcaataccatatctgcttaacatctttatacaagaaaattcgttcatccgtccccctagtaagatctctcaataaaagtaaagcattttgtggtacatggtgaaaggttagactaaaatcgtcagctatttgtttgcccaacgacacccaatccatatcccaataaaaaagctcgtaagtatctccaatacgaacattattgtcatcattacgtgtcatatagcctattcttccaacagattccggtttgcccaaatccaatcctacccaaccatctcttaaagttttagatgcgaaaaatgtcaacggatctaaatcaaaagcagcagaacggctataatgaggattcttacttcgttcttcagaaccaataattgttcctgtcagttttttattctctttatccaagaacatcaattctgcaatattacagcggtagggctttggacagatataacgccaataacgatactttgtagtatcgctcacatttatactacccgatacgctatactctttgaacgtatgtactgtgacggcatcactaaaatcctccttgtgtgctgcttgaaacatgctgtgttttaaacggagtgctgtagtgaacgctttgcgtgttaagggatatttccgttttaaactaatacttcttttggatgtgttatcgggattcaagaactccagttcacctttttcattcaacaaagcaggataattgaatggacgaacccttccatttatataatataccggcagatagacagctcccttctctattttatcaaagacgatctgcttactatcttttatttccgaaaaacaaataggaacccatttcgcattgtcaaatactgccagatatgcatatttttctttgcgttctcttttcccggaaagtacaggaaaaacaggatcaatggtcgttgcatattcatccgtaacgtcttttataaacacattgcgcaacgttgacgggacactaccagcttctttattcagccggactaaggccgaattgggagaatatgttcttcgatatactttacctttacactcacccggtcgtagggtagctaaaaaaggttcatgccctccttcacataccattcggcgatcgtaatctatcagaatacttagccacgaatgtgcatgtgcttttgtaggccactgcaaaacgaaatcatacgaaaccgcaaaacccttactacgcatgatggctaaagcagtatttgtccttgtctcacaagaattggaaggaatattgcaccaaaacggaatcttatataacgcatgccacttcagaggctttttcaaatcgacaataacagtatcacgtagtttaatattaatagcttctgccgcatgataaggtgttttattccaaatgtcattataagaaaaatcgcataatgtgtcattagctatcggtttcaacacattgcgccaatcatcaaaagcctgaaactctacgcacttataaggaagcatatattcacaaaattcatcgaatgtaatgcctcttgcccaacgaccttgttgccaatcgtcaaaagccgcgtctatactctgtatcagatagctggcttttatgacagagtaatcttccttaaactcaaaatcatctgatggaaactctaacaacaaattatttaattcattcacctgttcatcaatctttctgtcggagaagattatcttttcagcttcaacataatattcttcaatatctttccctgtatacgactggtgtccgggcatatttattatcaaaaatttagcagctctaagcttcaaactgtcggcttcgttttctttataatgctccaacactttttcgagttccggacgattattgcccgacagtgtcagcaccttttccagctgtttttcttcagagttttgacaactgaaaagcaaaagaagaaaaagaaagatgaatgtagctttcattttgtatgattgttagtttataattaaatattctttttgcgcaaatagtttctagcctcttctcgtatgatagaaacagtgtaagatggtatctttatccgtttattgattatttctaaggctacccgttcggcaagtatacagtttttagattttgcatagactctcaaaagtccttgtaatggaagaaaacggctaggacacatacattgtgccagtttatagcgtctttcagcttctttccaacattccatctgatagtaattgtcagctaattgcatttgcaggtcatacgtattgatatacgactcgcaatgcaagaatatgttgacgctttgtttgtacaattccacatttttcaattctgatgcataattgtacaagaaatagggattgccattccactcatcgtatagcttggtaaatacagataattcgttatccagcaaaccattgttcttttctgcaaccaacgaaattcgtttccatgtacactcgaaaatgatattcttaatcgaaaaaaaacagagtataaaaagaataatcaataaaaatggcttgttgaaatgtattgttcgtagagcaacctcccgttgattaagtgaagcgaggcagtagataatcatgaaccaaacaaaagcatatttgaatggataagaaaaacaggaaaatatagcaatagaaacaagcgtcagtaaggctggagtgtcaaataccacattacttcgaaaaacagcaatcaacgacaataagaataaagcgattcctataagtccttgttcaatcagcaacaacagatactcattaaatggatgattcgtgttccctgccaatattctatcgctttcatctgcataggaggaagacaaatatttggcttgttccggcatgtaatccgccttaaaagagccgagtccgtttccctgaattatatgttccttacacaatccggcagatactttccaaatcagaacacgaccggaagcggaagctggttttagataaatcagtccaatgaataaacctattagaaacaaagcgcctccgctgataaaaaagatgcgccttctatgaattaacttccgatagcggagagcgtaaaaaaggagtgttactacgcataaagtaagtatacctgttctcgaaccggataagataacgactataatgaggagaagacacgccataaacttgagcgtttttctttttccattagaagtctggcacaaaagaaaaggataacagagaacgatgcttgcagcaaatccggcgggattatcaaaagaaccagtaacagaaaaataagattgagtttctatatatcctgtgtattgcaataagccatataaggccgacaaaactccaacggcagctaaaatgctattaaatgtttctgtagaattttttccattacgcatcaacacaaaaagaatccatccagatacgatgtatacactgtgtatatattgcgatgtaaagagactgcaaacgaaaacatatcctataaaaacagtaaaggacacaaatagaaaatcaacagacagtctaatttttcgcttccagttccctatgcaaatacctccccatattacgatgccgacaacgaaacttatatttttaggcataaaatacctatccataaaccaatcagccgataagtataaggtggtgataagtaaaaaagaaaacgtaaaaacattatcactgaataattgccttaacttgcagaatataaaagagggaatctgtgtttgcattgataataattagttcttcctttgcccctgctccttttcctttcggattgaaagaaaaatgaagcgagcacgattcgtcaggatttaattcatacttctccaccgatgcttgtgtacatccacatccagtttcgatctctcctatctccaatctggcattgcctacattggtgattgtaatgctatcacgacaaattatatcagaactaattattccgaaatcgtgtgtataggaagacagagatacctctgccttccttttttgattgcaagaaacgcaaatcagcagaataacaataagaccaaagattttactcatttttcattgtcgctgatggtaaattacttggaatagtctcgatgaaacgaggtggatcaccgatcaaactatctaatattattctggtcttctttttaaattctcgttcttttataatataatcccaccatgacaaaaaaacatctcgatccgcttggggcattgaatcaataatgcgtagatattgagagagttcagactccctaatcggatattttgtccttaaatcacgagccaacatgactcggatgacattcggatattttgcatatttttcaagaaaagtaaaccgaccttctgaacgctgttcagttactgatgtatctaataagttactattctctgttttagtactatcttccgccacttttctccgatctctattccaatatacagcactccattgagcttctcgctcaagaatgtaagtattgtaatcttcattgatggaagtgcccgatacattagcgtcagtatcccaatcgaccatacgaatatagatattcccaggttccacaaaaagattaatatcagtctctttatggaacgatgaaccatcataggatatttgtgcaaaataaggctttcgtgtgacagttccttcgtaaaaaaattccttgccaatcacctttatttttatgctgttgtcgtatgcttgtttttgtccttccctttcttcaagaagatacgatttatctattaataacacatatttaccatctagagtattatcagggaattcaccccgaatcgtaaatttctcttgccccaaaagtaattgagcagaaaatacgattataatgagaaaaaacagtttctctttcatattaattacactttaattctataaaatcattttacagttatatcaagcatattatttacccgtctttcaataaaacgaggagcattacgattaagactatcggtcaacgctcttctctttgcccaatactcctctctcttcattgtatactctcgccacgctatcaaaatatcccgatccgctttgggcattaagtcaagaatacgtaaatatttagcatccaccaatcttttatttaagtccttaacttccaaataacgagataacattactcggataacatccggatatttggcatatttctcaaagaaagccaattcacctttttcaaaatcctcaaatgctgaaccaaaagaataagctccttcagcttccgaagtctgcccctttaaacggatagttctaaaaattctatttaccagatttctccgttcaatgacacaagtattatagtctttattaataggagtacccgatacatttccttcctcataccaattggttatatggatctggatattcccaggttctattacaaaagaagtcgcacttgtctgaccactgaatgttggtctatcgtaatatatttgcaccaaaaaaggttttcgtgtagttacccctttataatagaattttttatcagttaccaatatctttacttcatcgtcagatgctttccatttacgtttgtactcatcaggaagaaaagacttatctgtcagtattatatattttccgtctagcgaattatctggaaattcaccttgaatcgtgtatttctcttgtccgtaaaatagttgggctatagatacaaacattaatatgaatagatattttctcatgataataatttaagtgttacagagactccgtttcttctcttcgcatatttaattctcctaaaaaattgatacttttcccctgctgcaaggtgatataaatgctcgcacttccattggaatataccttaatataaaagttgcaattacctattgttgtatttgctgaaaacttgatgtgagcatttttctttttatctatatccatagtatattttttcaaaggagcctgaaagtaaagttcagctcctctcctgtatggtatatcagcttgaccgagataaagaagatcagaaaaaatagaatcatttttaatttctattgaataatcagactcattcaataatataggagctttacatggaagaatgcaagtacctacatttatcttgtagacttttgatgtaacaatctttccgacaacttccgccttttgtttcttttgttcttttttgctttgggcagaaagaatcggaatttctaccagcattgtcaaaaatagaacaagaatttgcctttttactttcatattagattataacttaaatatggatgtataaaaagcctaatgaaatacggttataggacacgtaccattactactctcacaattgcctattccgatttgcaaataatcatcattcgattgacaactaagcatagatatagctattaaaaaggttaacacaaccatattcaagaaagctttgctttttttcataaaactatttttaaggtagtaacatatagggcacttattctcccgctgattgtcaatttcataatcaaaaacacgtcacacaaatcacaataagactaaaattctacttatttttcatcgttgttgatgatgaattactcggaatagtctcgatgaaacgaggggcattgttacgtatactgtccaataatggtttggtttttttttcatattcatactttttaatagtatagtccagccaagccaaaagaatatcccgatctgctttaggcattcggtcgagaatctgtagatattttggaaaattaggatcccttgacattcttcgtccgttcaataaaaaagataagtggaaccgtacgacatccgggtattgggcatatttctctaaaaagagtaattgattttccatacttctccttgtgattatataggtattataatcttcattaataggagtacctgataccacaccctcatctgcccaattagcgatgcggatatgaatattaccagactcaactataaaatacaggccgaaatccaacatctttctttttgtccctgcactataaagatacgccaagaatggcttttgtgaaagtacaccttcataatggaatttcccgtcaaccaccaatatactatcaataaataaatgtttaattcgttctttttcttgactaagagctgaactattagtcaaacgcaaataactattatctaacgaatggtcgggtaattcaccctggatagtgtatttttcttgtccatagaatagctgggctatagatacgaaaataaaaataaatagatattttttcattattacgactattaaatattactcttacaattaaaatttactcctcatctggatagcttttatcacaactgctttcacaatttccttcttttgttcctgcagccgatagacaagcatctcttacttttacccagaatttataattatcaccattgggaaattcactcgcaggtaaatcctcaatattctcgttaaaatgattatgacattccattatttcttctttggccgtttccgcacaatcttttttgcatttttcacgtagttctgcattggtatctgctcgcgtaatcacgactttgtacattcgacttttttgtcgtgccctcatcaattctaatttagtaaaatcagcatctttaaaaacgtccctgaccaaagaagaaatacgattacggttagcttgataatcatatcctgtcagaatctttaattgagtaattgcttcggtacgagtctcgatattaagcagatttttccggagtaagcgatattgttccaagtcttctttagacaatttagagattgcgtttcgttctcttctcatgtcctttcctatttctttttccaaattctgataagcttccgaagcaataaagagatctgcagcagtcacatcttctgcctgttgagagtaatcgtcagcatcatccgtctgacaactaagtactgaaatactgattagaaaggctaatccaaccataacaaagccacaattccactttctcataagaatgacttttagagattactaattttgaatatctttttcagagcaataccatatatttgtaaaaattgtatagttcacttccaattccatctatattatataagataaggagctgtatttttccataatattagtacaaataaaagtttatcgctcttgttgtaacaaaggacgacatttataaattgaaatacaaatttcaaccgtatacaaatgcgtatacacagccaatgtatacgcatttaaatatggtttttaaagaaagatcattccaaacgtaatgatttaataaaatcagtaatagattcacaagaaacattcattttctttttcaatctactacggcgtattcgaaaagaacttcctagaatctggaataactttgaaatctgcgcattactaaaatcaatacgtaacaaaagaatgacatgtatatcatcttctgaaagtacagggtaataatgtctcaacttatagataaaaccatcttgatgaaaatttactcagagttctaatctattccaattgcaatcgcttattgcggataaagatgtaacatagatttgtacatcataggcagtcttccactcttcttcatccatagttatttttatctattacaactatattctatttcaccaattcaccattgatataaaggttcttgaaagtcacatctttcgcccctttaatatcatttgctcctttggctacattattaaaatgagaatcctctacactgatgttatatacatgtttatcatcctccagccctataataagcacacccaatttactcttctcacaagttacattcttcaaatgcacattacggacaatcgggtcaaaccctctcttacatttctcccgattctcatattgcagattgatgcgaagcacagcttcacgacattgtcctaccgttacattacgaacaaatacattttctataagtcctccgcggcaagtgctcgtcttaatacgaataacacgatccagattcgggctatccattcggcagtcttctacaaacaagttacggtaaccaccggaaatctcactgccgatcactactcctccatgtccattcctcatcatgcaaccacgtacgataatgttctcactgggaatattccatttacgtccgtcttcattacgtcctgatttaatggcaatacaatcatcacccgtatcaaatgtacaattctcaatcaacacattcttacaagattcaggatcacatccgtctccgttaggtccacgattgaaaacagtcactccgctaacaatcaagctctcgcagaaaagaggatgaatcacccaaaacggagaattcaacaaagtaacaccttcaatcaagattgtgtgacaggaatgtaagttcaatagctgcggacgcatgccatcttccggcttcatcagacgcttgtagacaggagtcgatgtttcaccatacatcaacagacgttcacgacctccattgcgctgagccaccatgccttctttccagccatattttacagctccacacatcggccaccaagtttccatgctaccttgtccatcgataataccttttccggttatggcaatattactttcaccataagcataaatcaaggggtgagcattatagcaatcaattccttcccaacgagttaaaacagcaggaaaataaaggctttgatctgtagagaatttcaaaacagctccctcttcgagatgaaaattcacattgctctttaaagtaataggtccggtataaaaagtacctttaggaacaattactgtgccacctcctgacagactgcactgtagaatagcctgattaatggcttcatggcaaggattagcctcatcatccgtttttgctccaaaatcagttataagaaatgttcgtttcggaaaagaggtccgtttaatctgtttttcgatacgggcgctttctttaaatgctttatcaaaatcaacagtattcgcaaatgttacctctgccacaaaaagcaacatcagtagtaaattaatagttcttctcatcataattcttatccttttattaatatgttatttttattttattgcaatgtaactcccatcagaccgataacaacatcgtttgaaagtgtttccaacgtcagatgacttaactctttggaaggattcagaagcatgtccaaaagtacacctgctcctccctcgatggaacgtccataaacaccctttatgcctaagtcctttcccaagtcattgctaaccaaacctgtcttaaaatgaatgcgataaggacggggagaaacaacggtgaatgcctgaccatcaacatagaaatcctgctcaataggacaccagttatccggattcactaattccaatacatcagaagttccatctgtatagtatacacgaacaataccattagcaatgcgacactgcatgtggttggtactgcctgccatcattaaataggcatgagaagcccgaccggaaagcggaatactcaaactgtcgggataattatcccacaacgaagtaaaagcaatattgcttccttgagccaatgttcggaacggcacacccagtttggtagtcagcatctcatcacgtaccaaggcacgcaaacctgcatcatcaatatcagcagttaatttcggatgacaccactcgccaatgccctgaacaggaagttgcaaagtggtataaggcgaacggggtgtcagatactcattccggaaaatatctgtcacattcgcattgaacaaagaatccatattcatcacccggcactctgacgtattcacctgtgagaaaggaagaatgaccggtgatttttccgattttgtaatctgtacgtttacaggctgccaccattccatctgtccttgtttcgtgcgaacaaagaatgtatgatgccccaaatgatcattgaccttacttcttatagatgtatcactaacattcggttgtatcagcactccctgcggatcatatatttcaccgaataccgcccctaaaatggatggaatacggatctccgctaaagcctccgcctgtatttcaggcaaaaccggattcagacagtttccttcccacacaatttcgacaactgcttttttggcagaagaagcaggaataacaaccaccggataaccggaagcagcttccgcaaagctccagtcaacttctttcccatttactttcacagaatgaatcctttctcttccgacattcacttgtaatgtcaaagccaaaggtgccttaaaacgttgctctatccggtaaatatctgtatcattctccctgacaaagtgataggttatgtcaggcaaagaaatagaagcttttgaccattctgcgggaaatcccggacgaatcaccatcttcccgttcaatacatcgggtaaaatgccatacaatccttgtaccagtaatcgggaagctacccctatcggatctccaaagtcacgataacactctccacgggcagcatcataaaagctgacttgccccaaattgccgggactgttacctaagtacatgccatccagaaatgaacttttcatcaatcgatatgcttcctccggacgtcctgcctgaaaataagccaaagctgtatgcattacctctgcgaaagccacattattgatactccaggaataaggtaaccaattggtagtggcaatcgttgcatacccctcttccagtccatcggcatacacggggatatgtggtatttccgtatcaacataccgtgtagcctgataagcttgaaaaggatcggcaacgtcgctatcgagtgcatggtatatagtccataatcccggactttcgtgaagccggcgatgtcccataaaatcctgatattccgcccaacaacctttgccctgcatccaaagacgcttattcatcgctttcaatatttgctcggcttcgttctgataaggtgaagggtcttcgcctatcaaagaagcaagaaaagcagccattttattggcacggtagttataagccgacgaatgggtgactgcgccactgttgtagtaaagcgcatcacttgcccaaatacaagcgtatgcatcatataaaccatcattgtccggatcataatttaatttttcccaagctagatggcgggtaatcacaggccacattttgcggacatacgcagtatctcccgtccagttgaagtgccataacaattcatccatgtaacaaaggttcatgtcatagtggtgcatctggttgttacgtctaggattccggcaaatatacccattgctatattgaggagttccccaacgtttttccgaacgcgccagattcattgtagaatcttgtaccggatgaggtattgtattcgggacatcagtcacctgactagctgcataagcatcaaaatgagtccgtgcccggtcatgccaacctaaagcatcaccagtatatccggccctccacccacttaacggcatacgccagccaatagcaccgtgcaaccaaacctgtccgtcccaaattccatcggcagctgcgaccaatgcaccacccaaagtgttcaaataagggtccggcgtttctatcttcaaatgagaagccaatgccaaagaagctgcctccgcttgttgatagagtttacggacattatagtcttcgggaacctccccacgtaccaagtatacttctttctgcaagggaagttcaccagtgacaaggtcagtcgcttcgacaggaagttcgaagcaatcagccggatctacccccatatctccattacgactcaaacgttttccggtagctcccccatgttgccaacgaagtatagctcctttaggcatattcgaaggagaaaaacgccaaatagctccatccatatcggctaatgccaatacagaaatacgcagttctccttttccccaagacgggtctgtcaaataataggtacgttttccagccgaataacgggattcacaatgcccggtgcagtcaagcgccaattctgttccgtcacgaagaatgactttgaaacttatatttcctccgcgtccgttattataaaaagcaaaaaccggtcggtcacttgtttcgacccgaaagggactgtgactaccgtacaaagcacgggtataccgattcttaccattgacacaaacaaactcatcaccatcgggacgatattgcaacctcctttttgtacctcgcagatgttcattcaaggaaatggattctttaaagtcaccgatctgctttgcctctctttgagcatttaatggtatcgccggcaacatcaagaggcaacaaactgtcagctttccttttaaaataagattcagatgaaaataactcatatttttttgtgtttgattatggtaatggcttcaatccttcccaacggacattccaagttccatctttcggaaatcccggattagtctccgtacatccgtcccaaccggcacacatcatcgcaatagcagtcagcaagccgccattacccggtaaataaatacgtaaacgaccgtcctgataattatgaccattcggcaagtatgtgtttgtgcgtttatccatcagtaaagctccgacggccttttccggttcacccaaacgggcagcattcatagccgtcatcggataatcccatccccaggttttaccccaattccagttatcccaaatccagtgcaatgtatttttcatataatcttcccggataagtttattcatcggaagaataccgactgcccctaatactgccatgtggtcggaagtataacgaatatctttataagtatctatggctgtttcagcagccagataaagtccttcattattagatgctaaaggggaaagtttgtcgatcatttcatcccattccagactacgttgctgtcccatacgttcacgccattgttgagcggtctgcatggcaaaatgccagtaagaaagttcaaaaggaggattaattgtttctgcagcacgcaacgtttcttgtgcaggaatggcacctttcaatacgtaacgtccttccagttcatcgtatgtagcaaaagagtacataaattctgcagtctcctgtaccaaacgattatatttctccaacacttctttagtcggatcagcacgataaagtaattctgccaaataaattagatgaggttgttgccaaatcagaaaacttcctactttggaaggggcttctgttcctgaagggtcggtcattttcatccagcgaacaccatcaaacccttgtctttgggctatttgacgcgctatcggttcagccttttcataccagcctaatgtacggtcaagtaagttgctacgattccaaagagcaaattgagcttcgtgccaccagatcatttcaagatgaaatttgccaaaccacgaattataggtaagccccgtctcttgcggaggagtagtacctgcactctgaatagcaagcaaatattggctaagtaccacacgtcgttccagttctttggcccgtgggtccgtacatgccgaaaagtcaacagctgcgccttccttccaaaacgagttccaatagttttttgcttcttcttgagtttgtgctacagtaacaggctgcgttgaaggagctgtactagtaaaagcacatgtaaaagctaaatgatcgtccatcggagtcaggacaaaataatgttttgctttctcattgaaagtagccttcccttcccaatacaaagttacgaaatactctgtgctatctaaagtatgtttcaaaactgcggaagattcattttgagtaacaatagtcgttgtatgtttatcaacggcttcccaattacatgcatcatcacaatgagcgcccgtaggatacggaaaacgaaaacaaatcccggtatgcgccttagaggtaatatttgcagcaatcatatcattagaaggatggcagactgtctccacttgataatcttcaccgtttaatttaaaccgactttcgatttttccatcccacaagcaaagtttctgatgaacgtcagttacctgttcaatatccgtaccttcttccacgtcaaaaccgacaattcctaaatgaagacgatgcggattgacacgaaaccaattagcggcatcctgctgtctgccttcttctttgaattgagtagcgtaaagttctttctttcccctgccaaaatcgtattctttcagagtttcttccgaagtaagccggtccggattggcgaagctatgccagccccactggctctgcgttcccaatggaactccttttttataattgtccggaaacgtctgtaatccggttatgtctaccgtataagcaaactctccatttcctacagaaagtgaagccaatgaatcgaatgccgtcacaacaggactgttcctttctactaatgcctcgcggtcaattatcggctgatttccatctccgcaagctgtccaaataaaaagtgctgcaatagatactgcgaatgttttcatgattctttattattgttatttacaaaagtatttatttttgaaacaaatgacgcggattctcattcaaaaacccgcgtcactccaccctaataatccaatccaaaggatgatttgaggatctttattttaaattccatttgataaaatagtctccattcattattttggaacgaatgtcttcagcattgccagtagtttcgtacttttccgaaatatacttcgccatgaaactattatcattataacgttttgccatacgaatcatagccggataaacttttccttcgcatgccatttccagcatcatttctttcaatatttcttcgtcattgttttgtacattagatgtgaaagtacgtgctcctaagttactatagcttacttctactccacgaatccctctgtcaccatatttacgactaccaataccagttgtcccgtttgaataataatatacagtactattattcgtccaatgaggagtaataccataccaattgccggaataagtaccttcctcatcaatatcaaactcactagagtaggcattgactcctacattaattagtgcgtcaactacagatcttctacctaattgattgaatgcttctgccaacataaaataaaggtctgcaccgcggtaggtatatacgaatacatcatcgcgataagcggtacgtacaggtttagaagttggacggaatttgctgataacccatttaccattgtattcagatactgtgtaacccattctgaaatctttatctttactacccagcggaccgaagtcattatctctgaaacgttctacagcgacctctgccggtgccagccaatatttattcggataatcagagtcgaaatgcttcagcagactgtttgtctgcctgttttgatagtcatacataattgctgacgccgattcataatcatacggagtctcgttattaaagaaattggtataatgactgaacaacatatcattacgtaagaaagcgatagattgattggtagtactttggtagatactgttcatcttattaagtatcaagttgacacattgttggtatctacctaaccacaaacaaatctctgcatatagagcatagtaaggaggagtcatcatatcccagcggcgatattcactatttgccagctccgtatccgggtctacccagtctttccatgctgtttcgtaagttccgtcaatattgtcataaccaatatctagcagattcttgcaagctaccatcgtttcgtcaagattcaatatgtcaaactgtgacaaatctctcaacgaagtcattggtttatccacccatgctacttctccgtagattttagcgatcgtcataaacatccatgccttgacacgcagcgtgctgctgaccaatgctttatagtggctttcattaatagagttcttttcttcgtatgttttcaatttccgaagataatcgttacaggcatttattacttcgtagaatccagaaggatctgcatatgaattaccacttaaatcatcatcgtaattgtacaagttgtagagttcagtgggtgccgttgcagtcggcaccaccatttctccccgaagttcattcagataaatcactttgtctccaatggcttgcattttagtcatgataccaatgtaaccggagtacatctcactttcttctgatatataatcctcattatccagggtaacatctgtatcaggattgaagaagtcatcgcatcctcccaataaagtaaccgccagcatgaaagcggcatttaataatatctttttcatcttcatcattagaatttcaagttaatacccagtttgacagatttcggttgcatcactttcgcataatcaaatccttgtgtagcattgctgccagatgaataagcgaattccggatccatacccaaatatttggtagcggtcaacaggttttctcctgtcacataaattgttcctgaacggaaaaaattccaaactggtttgtcgaaattatagcttaacgtaatactcttcatgcgtaggaaagaagcatcttcaatccaacgggaagagaagttgttattgccgatagcatctccatagctagcgcgtggaatattggtaacctgtccttctacattccaacggttggtcactgctacactttggttagagaaagaagaaactgattccagtgtccttcttaccgcattgtatgcctcattcccttttgaataagaaaattcggccgccagtgcgaaatgcttataacggatattggtatagaatcctccaaagtaatcaggagtggcactacccaatgatacataatctttagaatcgatgcgtccgtcattattctggtctacataacgtacatcaccagcactatatgcttgattactgctgttggtcaatgcggcttcactcgcttccgcttgggtagagtagacgccatttgcttgcaatccgtaaaattcgtatggatttccacctacacgacttactatcatcgaaccatcactatattgaactgtttcctgatcgtttccgcccaatgatttaatcttactttccgtgaaagaaatattacctcctacaatccactcaaagttacgcatacggatgagagaagcctgcaatgaaagttctactccgttgttatcgatttttccgacgtttgcatagtaggcagatgttccgtagatagcagattttccaatgttcatgattacatctttgcttctgccacgataataatctactcccaaactgatacggtttctcaagaaagaggcatccaaacttaaattcatctgcgaggttatctccggtttcaaatgtgtgttcggtatttgggtacgaataatacccgatacagccatatacggtaaactactataataagattttccataattggaagagaagcgactgtttcctgtcaggctgtattctgcacgcaaatccagacgggtgatccaatccttgtctataaggaaagacatattcttcgccatccatgtgattccgcctgatggataaacccgaaaatggttggtgtatcttccgtttgcggaagaaccgtcgatagacatattcaatgcagcattcaatacatgattataagtatagtcaacgtgaccataaatattagcccagttccatttattctgataaccgtcgaaataacgacctatagcatcagccgaacccagtacttgatagaagtcattggttgtgttgcgcgcataggccccatcgtattcctgcaaagtagtcaaaatttgcactcctgccatagcattcaaagcatggcggctactgaattgtttgttgtagcgcgcatttaggttataaaaataattagtcgtttcgtttacgccttcccggattgtattttcttcagtaccgaatgcgtctgtagtaggaacgatagtaaaatcggttctgcctggaacaaaaatatgctccttattatagttgtagtaaagaccgaaggcaccactgagagaaaaacctggaaatattttataattgaaaccagctttaacatttacgtcatattggcgactgttcgcatccagattattgacaatagctaacgggttacttacagcaaagtccatatttttgctgattccataatagtattcagagtaaatcggagtaaattctccgttatctactttctggtagggagcaagcagtggagactgtgcataagcagcaagcaaagggttggtacgaacattcatcccttgttcttgataattaccgttgatatatgccaatccgacggtagcatagacttcaaaattcttgctgaccaagaagtttccgttcaactgtgtatgatagcggttctgttgagtacttttcaatattccatcctctttagagtagcccagagacaagtcgtatttggcgatagcatcaccaccttctactcgaaacagattttctgtcacaaatccgctccggtagattttatcttgccagttcgtattgttattgtagtagttggcatatctgctgttggtagggtcactcatgaaagggaattcggtaaagaactcatccatgttcccgaaataactcattcccatgtctgataggaaagagcggtaatctataccattcagcaagggcatacgtttgttgttccagttaacaccaaactgaccgtaataactgatttcagtgttcatgttctccgatgtggcaccatccgtttcaatcagaatgacaccgttagcccccatagaaccatataaagccgcttccgcccctttcaatacggtaatattttgaatatcattgaggttgtaagactgaaagatattacggctcaatccgttaatcaatggtgagtcatttacgtccggtatataaggaataccattgataaccaccagcggagcattgttacccacgaaagaacgtgttccacgaagattaatgaaacttccctctcctggcataccgctgccacgagtcacttgcaaacctgcaatctgtccagccaacgcacggtctatcttcatacccgcaggtacgaaatcctttttagtgatattctccgcagatgtagtcacttcgttcgtttcaatacggaaaggcaatactgttgtttcattatatttgtattccgattcaggaatcataatgatcgtcatctccttacgattatccactgcttgaagcactgtataatatccggcagcccaaactgaaatattggctttccgcaaactcttgcattctatttgaaatactccgttcttgtccgtagtgacatcttcgcttccggtgacagacaccaccgcaccctcaaccggaatattaagggtggataatacttttccgcttattttaccttgttcctgcgcatacagatcgacagcaaataggcaaactaacagggtgaaaaacaaaatttgtatctttttcatgttgtctttatttcataagattaataacaatccttgtttggtcgcagacaccaatgatataatgctgcttcagataaattggaacctgatccactaagacgtattataatttcactggcttcgtcgcccggaatagtaactgtacctacagcacctccatcacgatcatattttgatttatttttaaatccctgcgcaacagcttcatctattccttccggatatccacctcctgcacgatcatagtggtaagcagatgcattattaagcaccgattgtgaaagagtggttacaggaatttcttctccattcttgataattgaaacggcaatcgctcctaaagttttcttttgtctgaaccccatggtgagtgtatatgttccaggaggaatcttataaggagtagctacgtaacgggttcccactgtttcacctctaaacggagtataatcaagtgtatatgtttgattatcagcatctgtcaagttaaaatagagaactctgtaatatatagtggggaatcctaatgctgcccatcctgcgcagttcgcttcatctgtctcactaatcttgttaaatgaaagattggtagtcttgaaatacgtatctttatcatcggcactcagatattcgtaatttctgaaaagttctttaaggcgataaatcaatacgttagtaggtatcttcatttcagtgacatggtaggctattccgttactcatagatatcgggttgtcaagatctactttctgtacagtcgtgcgccattgtttactgaatacagaagtcaaatcctcattgctttcaaaatcggctttgtcatagatcttattaaagaaagccgattgaaatatccagttttccagaatactatctgcacgtgtcatattccagttttccagattcttccgtgctacgcttaatgcgttattgacaacatcattggacggaattagcatggtagcactgagattttcggacatgatgtcaaactttaccttttcaaaataaggagctcttacggtaaataccgagtcatatacagtattgcccgtattgtctactcctaccactttacttgcgtctctgtcaaatgtcaaaacattacgtgacaagatcatttcacggaagatagaataatcgtcacccagattttctatgatctcatacatgcttcgcggagcattgatagcctgatctaacaaatacagatacccattagtcaacttaattacccgagttactgttgcattgttgaaacgaataccggtagccgctcttgtttcgggagaatcaacagaaatattcaggtacttaccgctccacatcaagagacgttgtccgtcttccagattggaaggcgagatggacgcattggaaatataggtttgagccgtgtatataggatcatcccccgctgcaatgcttgactccactgctagaatagtatacatctgttctttcgccaataattggtccaccatgcccgtttcgttaaacagctggtacatattgcttaaagaggattcttgagccaaataatctgtaagggattcattgactatggaaatctccgtattattaaccgtgctggcgttttgggcataatgctcatcccatgtgttagtacaaccgctccctatcaatccgataagggcaacgccgagtatatattttcttgctttcatggtttattcgtcaaatatgggttcaaattctaaataatctaagtatatacgatagtcggatttatcactagctgcaggatcagtcaatatcagtctgaatgtgtgagtagagttttctgtaaattctatctcatcataaatcacatcttcataacatcccaacttattgcttttaagagtagtggttgaactggtatacggtgcacgtgtaactgaatgttctccgtcaaagctaaaaatcatttgtcctccgttacttccgctgctttttgttctaataaaatccatagatgtagcataaccaaagtgtaatgttactttgtattttcccttgataatagacggcgtttccattgagatccaacctgtattaccaatgttcaacatcagaaagtcataattgcgggcagttttccagtcattattcgtccgagtagtaaaataggtaatattataatatttatcaaaagctcctgatggattctttagttcatattcataacaattgagctctgagatgtcacatttcttctctgccgttccaaatgattcctgaaatttaatcccctcctctccatgaccgtctgcaatccagtctttgatagcagagaaattacatacatcaaacaatactgtttccggttttacatccgcaatcggcaggtaagtggaaacctgatgaatatagccgttcttagcttgcaaattacaagcgtcttccacaaagacagctttatttgcttcgtcctgatagttcaaatagaattttcgatcttcctcttggcttattcttaccacatttcctttgcacgatgtattccatatcttagaagtcgcattttcactgtcgaaactctgcaagttgttcaagtcataacttccggtcagaatatgataggctacatatttatacaatgcattctccggattagtatagtcgctacttgctcccaacagttgtgttaaatcagccagattattgacacctgcatcatggaagacatcgtccgttacagccaacagtgtataattacgtttctgcttgatagtttgtccctgatcatttttcagttcatcatagataatgttcaactcggttccccaccccgtcgcatctaaagcggactttaagagggtataaggacgtccgctttcggatatccgggcatatacgctttcagtaagcggagttagcgtatttcccaatacatatatgtaaccgttggataccggatttgcaaattcaagcacatgagcttcactgttcagataaacagaccgcataccaccaccgccattttccgcacttccgaatgataccatcaaaacatcgtcagaaacggttcttttagctaatgcaccttccttctcaataaaagttgcttgattgatggtatcttgtataatatgataagataccaaattacgcgcatattctgttcccaactcttcaatggaagaaacccctcttcgggtgtaaaactcctgtacggccgtattgttggggacgaaaagagtgaagcgttgggtagcctgattcaccgcattgtataagtccgcatatttcatgatgtgaatccattcggaaaagtcttccgatctgctggataaataagttgcggcaggctgtgtgtcgaagaccacgaaagtgtctccatcatacggatcattgcaagctgcacataaaacgatgagcagcatccagtatattttttttaattttttcatcgtatatcgttatttaattattcataataaggattttgtgtcaataacgagttgttgaatatatcttcagcaggaattggcagataccaagcattatcattatccagaacagaactcagccatttattttccgctgtaaggttgttctccataatgattgctttaaagcgggctttatacttgaagttttgctgcttgccgtagcgcaataggtcataccaacgtttgccttctgcagcaaactccatgtcgcgttcatccaatagcatctccaataacatttcttcagtagcttcgttgatattgtccgcactgacttcactccgtgggtttagctctgaacgttcgcgtatctgattaatgatagacaatgcctctgtccagttggcggaaccgccgatacgaatcagtgcctccgctttcatcaacattacgtctgccatacgatagataatataattggcatcctgaatggtacgtacggcttcccggtcagcaactcccattcctgaatatttccagataatgccgttgtccggatagctagcataagcagtaccggcaaatgaaccataataagtgcggcttatttcatctcctctatgctgtgtgtattcttctattaagcgaagagtcatcggctcagaatacatatatgagtctattgtaacatcagtgccataagggaaaaccttggatgggcttccgcttccttgtgcataattggtttcgtcatattgtatttcaaagatagattcgttactgttaccgggatagaacatattgaaccattgtccgggtgtcgacataaatactggtcgcatagcggctgtagcattaattaggtaatcagcatacgtgacacattcttcgtattcttctgcccaaaggcaagtttccgccatcagtgcgtacaatgcccatttagtggcacgccctttggtagcccatgttccatcaaatgtttctttggcagcattagttgctaacgctgcacgtacatcgctttttatcaattccaaaatctccgtttcggatgacttggctacgtcattaggcatggcatcgtctacgtagggttcggtaatcaagggcacctcccggaagttacgtaccagatacaggtatgacagtccgcgtaggaaataagcttccgtcagatgtgagttcattctcgattcataataacttgcatctttgtccatcacggtcggtgcatattttaacacagcattcgccataccgatcacttggtagaaggtaccccactgaacagttgatgtactgggcaacacctgaaagttctgaatcagaccggtttttgttcctctaccgggaacaatgacggaactccctctcaattctccccagttgatgatataggggacacaagtacgcaaacgactgtatccctgtgcgagaatggcttccacatcttcagaagactcccagtacatatcggtagattgcttatctttgggcagaatatcaagccaatcgctgcatccgctcatcaacaaacttccggatagtaacaatatagtaaatatctttttcatgttcgtagatcttttaaaaacttaaattaaagccggcaacaagctgaatagaagccggtgtagtagcactatctctggcatatgtgttttcggtcttcacttccggatcctgaccggtgtatttagtccaagtaaagaggttgtatccggtgacatatacatcaatattactaaatccccaacgctgaattattttcttcggcaaacgataattgaacgacaaagatttcaaacgcaggtaagaagcatcttccacaaagcggtcagagcccagtgtgttgtatccttctccatagagtgcacgcggaatatctgtctgatcaccttcgttgcgccaacgtctaaggacagccgtactttgattgtcaattccgcgcatggactcattgtttaaacgggtagagttgactacatcctgtccataacgtccgtaaaaaatagcagacagcttaaattgcttatagctgacattaacaccagcacctccggtgaatctcggattagagttacctaaatagacaatatcatattggttgatgacaccatcatgatttatatcctcgtagagagcatctccgggagctatggtagctgttccattccgcataacaatcgcattgccggaaatatctttcatcacgtttccatcggcatcacgtgcatacgtggcatctttattctgacaaacgcctttgtagcgataaccatagaaagaacccatcggacgtccttcttctctacggtatgcatattcaccattgttgaaggtatagttttcttcggtatagttatccggcatttccgtaatcttgttctcgttgtgggcgatgttgaagtagaatccaacacgccagtctctgttttcaaaagggacggcatcaacacggaattcccaccctttattcgtcatctttccggaattcatgtagctgacttcataaccatttccataaccgatactagttggcattttaactttcttttgcaacagatctttgatatatttctgatagacatcgaccgtaaagcggagtttcccttttaagaaagaagcgtccagacctgtattatattcagtggttgtttcccatttcaagcgattgagctgcatggtgctcggggtaatggcactcatatccatgtaattgtcaccagaggcgtatgaacccagatagagcgaagcaccggaggcagcatttcccgtctgtcccaaactgaagcgaagtttaaactcatccatccagtcgttcgagaagtccatgaatttctcatctgccagatgccaagcgacaccgacagtagggaacagacctaaacgttccgatttacccatagttgagttgctctccaagcccaaagaagcattgacgatatagcggttcagcaaagtatagttcattaaagctaccccattgatgctacgtgtcttagaatctccggaactaattttacgtacggcacttccgatagtagggtcggcaagaccggaagaagcattaccggaagtttcacttccatagctggattttgtcgtttccacagtacggaacacgccggttgcaatgatgctatgcttatcattccaatttttgcggtagatcaacttgttctccgtattgatggtcaattgatcagaagaagtatccgtactgcggtttgcattgctatcagtccaagcaagtccggtagctacttgcggcaagaacatacgtcctttcgtattacggatattcatgttgacattaccccagtaggttagtccattcaatatgttatattcaatgttgaagttcatcttactttcccgctggatggttttgttgacactctcattcgccatagcgataggattgtagtatcgacttttcttgctgtcaaaagccgggtctaatgtggaattttcgttgtgattgaaatactgtgaagtataatttccagtttcatcgtcaatatagtaaggagatttgttcggtgctttgcggaaagcctctgtacgtacattgtaatagttattgtttctcgtagattgaacaaaagaaaattgcgttgtgaaaattagcttgtcagaaaacttataacgtacgttcaacgaggagttcaaacggctgaagtcagttccaacagtcgtgccgccttcgtccagatagcctaaagagaaacggtaagtcgctctttcgcctccaccactcatagaaaaagtattttcccatgattgcgtatttctgcgtacttcagacagccaatcagtattctggttatattcattaaaataagtccagtccggctgataaccaatctccggagaattgtaaagcatctgcaaatagttggtagagttggcaaggccaatgtaattggcactattccacagagcatcggaaattaaggctgaatattgattaccatccagcatcggaatactttccggttcaaacttagcggagaacttggaagagaagctgaaacgcgtttttccctgcactccctgttttgttttgatgaccaacacaccattagcacctttggtaccccaaacagcggtagccgccgcatcttttaaaacctcaatagattcaatatcttgcggtgaaatattcagcaaggcgcccaaatcatcattattgatggtcgagaaatctgtattatcatcaatttcagccgggtaaggaacaccatcgaccacgatcaacggctcggaattggcgttcagtgtacttccaccacgaatctggatagaagcacgtgcaccggggtcaccaccgcctaatacaatgtcgacaccacccaactgtccctgcagggcatcttcgatagaagtgaccggagcaattgctaccaaatcttccatgttaactttctgcgtggcagaagattgctctctggaactgatacccatatcgtttcgttcaattcgttttcccgagattaccacctcattgattgactgtgtatcgtccttcatggtaatattcaatttagtctgaccgttgtacttgattcgttgagttttcattccaatataagaaaacacgatggtcagattattttcatttggtactttcaagttgtagataccgtccatatttgtgatagtaccgcctaatgaacggttttgggaattaaggatgttaacgttcactcccaccataggttctgctgtcgcaccgaacatctcggtcactttaccggacaggactttaacttgcccaaaagcttcgccggcagttgccgcgaatacgatagcaatcagtatgtattttaataatttcataatctctatttttctgttaatcaaaagacgtcatcaatcaggtggaaacaaccttcttcgtatgcaaacgggaaatagttgtagtccggaatcacatgacattctttgtatccttccaactggatactcagtgaagtcccattatctgtataaatcagttgtggcacagtcgctccttctgtttctgccgtacgttcactccaataacgcccgctcttgaaatcagatccaatataaggataagaagctatcacattttgtttggcagtcatgaagtatgagttcagatagtttgctaattttgctttatcaaagtcaccggtcaactcaccattagcatcaaatgaagcgttggttgctcccggaatcctattatccaataacgcttgtctgatagcttcattggtagggataaatgcgacaaaccgtccttttaagaaaatattcatcagtacttgattagatataatatctgtttgacgcagtaattgggtaaagcaataatacggataattcctgtccgcacaaatagcaaggttgtagttcaagtcaccactttctgccataaatagctgattacaatcaaagctgtaggcactgccattagagccgtctttcagtttcgtaaatgggaagaagacctctccattgaattgaggattcaattgctgattgaaaatagcattacaagtaatttctccgtccttaacaaaccagaagttccaactggactgtgtagggattactttcattccattctccggcaattcactttcctgaccactaggaatgctagcagagtgtaaatacataatattctgtttggcagaactactgatttctgaccaaccatcatctcccatttcttccaatccttgagtactataaacggttctgatacctgaagcatcaaattggtccgcagtgggaacaagcataatatatttcactaaattagatgtgtaagaggatatcagggaagaacctcccaatgcataaaggaaagaacgcgcatcccgatattggaacaaaggtcctactacagacgcgaatgcactcggttcctgaatctcgttcattccatagagtgcaccgttcacacacatgattttttcgttcaacattgccggattaatattgattggcgaaccgagcaaggattccagttttcctgttcctatttcttcagggaataccaatgagccaccatagataaactggtatagaaaatagttaagagccaatggatcaacctctcccaatgaagaataacctccgactttccaaaaattgtcgaagaaatgattaatggcagtgtttgacggtgcaaagatgctgtaagcggtagcagtcaataacgtgaaatttagatagctgcttgtaggccattcgcaagcaatattcggcagactgttgtgctgatattgataaagtgtatctactccgtatgccgcagcataagagttacttaatgtattatcggcaatatattcaccgaaagaatcatataaattgaaaaagatagaatattcatcttgtttcttcaattcggtataaattgtttccaatggttcaatcacccggtcaaccgtatgaatatagccattattagcaattattccgtattcttttactgatgcattagatacattgaagccattgtctcctgtccaagtagagttgggataaaaagcttcgtagttactcttcgcatcaatacctttcgtctggaaataacgataagagaataccggcaaatagcgttccaagtggtataccataacagaagaacctgtagcagttgtctcaattgttggtgcgtcgctgcttcttgttcggtgtttgtaatacagacctgcagctacattctgctcttcttctgtttctgtgtttcccgtcggacggaagttaaccagtttctccttattataagaataataaagtacgtggtaacctattactttttttacctcatcgacaggcatgtcgttaatagtggcataacctttttcgcttagataggcttggaaagcgctatcgtctggtgccataatagttaagattgctttaccttcaagcatttgcttgaaaccggcaatctccactccttgtaggaagatggaatagtttccgtgttcactagaacttaatacttcccatgcgttgtctgctacccaatcaggcacttcgtaatgctcgtccatgttgtctttacaggctgtaaagagtaatgggaggcataacagccaaagcattctccgtaaagatactttatttttcattgttttcattagtttaaaattatgagttttattatttgaaatccagattgattgataacgcataattattctcttccaaatatggataatctacatcaaattctgctacaaatccggcagttgtggtagatgtatggtcttcatccaaatctaccgtattgtaataaaattcttcccctaaagcagtaatttcagatgttactaatattgtacatttttgatatgagtaacggactccttcgtctatcataataactagctttacatgatgttttccataagacattttatgccatatatcaacatatttttcgttttctaagggtacagtaatattgggataagcaggatactctgccccatctaaatatacatgacaataatcctgtctatcttgcgtattataaatatagccattatgagccattgcaataacagatattagattctcaaaagtagaatcttgttctgatatactttttgtactcttttctattttttgtatacaagtagatgtgtcgaataaatccgtactatcgcaagcaacaatgaaaaaagaagaaaataaaattcctaagatgaattgtaaaaaattttgctgtttcatataacttattatttattgtatttcactatttattcaccgtacgcttctttccaagccttttcatactcatctggaaattcgagtgaaaaagcatagttttcaatcatcgtatatccgttctctgcaatacgaacggcatctcccgcattatttttatttagcccccatttgtcctcaaaatcatcgggtatgccgtcgccatccgtatcttttctagcagtgccaacattaatattttgccaagtcttggcaagagggtattgtgtctctatgttttgatttctaaaaattgttcctttagtacctaatgaagtcagttcatcaatcatgaatttatctaccaaatcacgattgggtaaaaccggcccaacattttcaactatccaatgataagcttctgtagcactagtttttatgctgatttccgagtgttggctatctggtttactcaaaaagacaggagtggcactgcaataagtctgccaattactctgagtgatttcgaatccatttaatgtgccgtctttatcgttatcataataattacctacacaataagtatcaaaatcaccatcaccattaccacctatgaaaggtttagttggatttacttgttgataagtatctaccaaataatttttattgtcactacttattccattataatgatatttcgtttcatcatcgaacatactcttatctgtagtttctataggatatgacgtattcacccatgtataagctggtcctttgataaaataattattttcaataactgtattagagtgcccagaagattccccccccatattataagccgctccatttccccaattataaataacattgttaacaaattgattcaatcctttcaccttaaaattacgagttttattgtcaataaatagatttcgaaagacagtaactccttctttatcactagtttgaactaaacctccgcaagaatgattctggcatccttgtcctaaaattgaattctgcaatgttatgttatagagacctttcggttgcttgtcattattgagtgaaaaacattcatctgttccccatgtgaaagaacaatgatcataaatttgatcatgcccataggcagctcctcctgcgtctatgttgtcactgccactaacctggcgaccagtacgcatacgcatataacgtacaatcaggttattcgcattggtggaagaagccctaccattataaagttcgatgccatcgccgggagccgtctgaaacaagactgtttgattgtctttaaacacaagtacttctttattcaaatcaatcacacctgacacgtgaaacactacaattctgtttgcttgactaacagcatctcttaacgatccagcaccactattattcaaattagttactacataaatttctcggttgttactaccacgtgcaccatcagcgtttctgccatatcctactgcacccggaaatgccggtgcataattggctaagacaggaaatgccggaccagaacttgtattaccaccactttcttcctcctccagatatgaactgtgaggattgatggcaggatctgcatcctcctcatctacaggttctttatctacgcaagccgctaacgacgagagtgaaaacaaaaagaaatataaaatgcttgttaagcatctcacggcaattggacatgcctttttttgaaaaaatactgtgtttttcatcaacataaattataatttaaattgttaatttgattaataaataaaatcaaacttaaaaagtgtacatctattatggaatacactcaataattcaactcaatacatcccataatgaaaggtcctgttgctttagcatcattatctctcattttctctcctatataatactcgaaactgccgtcacggtaaggcttaccacctaatccacccacttggcaacattttgtcaatgtcaatgttccgtccgaatttgagattagtagtttatcacacagacctttaaaggccttttctgcaatggcacgatactgactatcaatatatcctttattcactgctttcatataagcatacatacattgtgtcgtaacagaagcttccgggaaattaccggtacgtgaaagttgatcaatcacctgataccataagccatttttatcttggtattttgaaagagtctccgctaattccttcgtccatttaatcatatcagcatagcctgaatgatcttggggaatatattccaaagcatctaccaaagccataaaccaccaaccaatactacgtccccagaaattaggagaatggccagtttccggatcagcccagcgctggctccggtcctcattccatgcatgataataaagtcccgtcttggtatcgtatgtatgttgatggcagagagtaaactgcttaacagcctcatcaatccattccggacgattaaattcagctccatatctagccataaaaggagaagccatatacaatccatccaaccacatctgatagggatatatttttttatgccaaaaacctccatctgttgtacgaggttgctttttcagctgatctatcaaattctcgatagccaatttatatttctcctttttggtttccttgtacaaatcaaacagaacttttccggaatttatataatccagattataggtttctttcttatataaatgaatatcacctttatcgtctaccaaagaatcagcccatgcctctacataatcaaagtacctacggtctcctgttttcttccaaacttgtaacatcgcacaacaacctactccttgcgcataaccaaaatacaggcgttttccatgatccagttgccacgcttccgggaaacgacgaatttccgaatcggcaaacagacgataataagtgtcgggagcaaaagtatccgtacggaaaggaactgccggaagtccggctttattaaacagattcactctaaagaaagtcccataaccgtagcgtacagctacaggtgcagagacataagttgaagaaagtgttatcgaacttccatcaatcacagcatcagccggataaaaccgcgcatcattgccggcaataaaaaatccttttaccggttcattgccgggtgtctgcaggccaccttccgcaaattcaaaatctaatgtaatttctctcccattcactttcattgatttgtagagaggtcctgaataaacaatctttttaccatattgctttgctaatgcccaagctgccagccgttcgcccggtgcaactttatttcgtggatgtatgtcggtagaatcggctgcatccgtcactactgccataccaatattttcaagtccacttaaccatgtttttaattgtgcttcacgaatacctgccggttgcttgtaatgtggtgcaatctgtacgaaatagaaaggcatatccggctgattccattctttccgccaactattaatcaggttagtaaatacttcctgatatttctcataacgaacagagttggattctccctgataccagatatttccttttacagtgtaccctactataggagcaatcatgccattccacaaagtagccggaaccttacacttatctttttccctactcaccctttcttttgaatattgttttaagacatcagcatacagcagattgttttccatcactttcatacttgtccaagattcagcatgtgttcctccccaagtagactgaatcaatccaaccggtgtactcaattctttatacaatttacgtccaaagacaaatcctacagcagaaaagtctttcagattctccggattacaaaccacccactttccaacgcaatcttctttctcactatcaggtgccagttgatgctctacatgaaacaggcggatttccggaaaatcagcatctttcatttcttccgcttcattcaacattcctgttttccatttcacttgcggattacgggctacgggaaattccatatttgactgtcccgtacaaagccaaacttcacctattaatatattattgatccggatcttattatcacctttcaacattacagattgtccggaagtagcagccggtgtttgtatcatcagttcccaatgaccgtttgctaaagcagtcaccttgtatttcttatgatcccatgaagtctttaccaaaatcttttctccgggacgtgcttttccccaaaaacgtactttcgcattttgctgaagtaccatattatttgataatatagaaggaagttgtatatctgcatgaatacctattggaaagaaacagaccaataaccacagacaaaaaataattctacagaatttcattgtattttatagttttagattcaatattttactgaataagcacatgtcaaagataccgcattacatggtagagttaaagaaaaggaatatggagaattcgactttcttatgtaaattcatatgtgtacagcccatcacacgcctattttgtacgattttacaggctatgtacgattttccagtctttctacccttcttttttaattcactttatttatctcaacctttctcataaccaatgcatcaataatatcttcatctatcttcacatcttttttagccgtaatagtcaaattgtcaaaacagaaattggataatttatattgttttgatttctctacagcaaaaaaggaatcacaatccagatgaatattacgcattgtaatatagctggaatacgagactggcatatccttgcgatctttcaaatcataaaactgtgtccaaggagcaataaagatacaattgcggacatttccttttatgtcttcaacgaggatgtacttatattgttggggagtatccggacgcattttcaaccacaacaggcgtttagcctggtccagattgcagcgtcgaagaattatattatgattatatatcgattcgctaccgcaagtcagcactccgtgacagaatccaaaagtacagtcttcaataataatatcacaattgccaccattatcgggattttgatcagcccatggtcctttgccgccttttaatgcaattgcgtcatcattaaccgacatatagcatcccttgacaagtacatttttacatgcatcaatatcgattgcatccgtacttggagcctttacaggagaagaaggtgaaaagatatgcaaatccaaaagttttacgctatcacacttataaatgtgagttgtccaaaacggagaattaacaagtcgcacatctgaaacttgtacattattgctatgagatatatgaagtagacgaggacgcaattcatccatattagtacatttaggaataacacgccgccgcaaccaaaatgacttccaatatcgttcaccgtttccatcaacttttccttttccggaaagggtgaaaccatctaccttatcaacattaatcaaagctgaaaagtactttaggttctgtccctccatccgtgtttctattacaggaaagttgctaatatcgtcactaccttttaatatagctttctcttccaaatgcaagtgtgttcccggcttaaagaacagcgcaccactaagataagtaccttcaggtataacaatgactccgcctccattattagacgccaaatctataacagcctgaattttctctgtctgtaacagtgtactatcattcactactccatagtcggtaatcaagaaactctttcctaatccatttatatcagttttttcatttttgtaaaaccaatccggtataattttaccatcgggaaatttttcctgactaaacagttgcagactgcaacatgtcgctactattaaaaatgctgactttatcattttctatatctcgttacttttttgcaaaagtaccgcatgtttccatttgccccaaagcaaaggatatggagatattgattttcttatggagttctatacaaaggattcaaatactatttatctatatacaatattccatattcagacttatttttgtacatatatcgaattaaaataaaacgctctctacagtatcaaaaaagcgcatcctctttataaattttgtaaacacaatctctcctttacgtccgccaccacgaagaaagatttcataagtactatttcctgattcttttatttccagcagatccaaatccgtattctttgtttgttccccgcgtataaccgtttttaatacccctcctgttgtccggtccagttccactctttgacattttaaacacccggctccaagtagtacttcccgcagtataatgttccattatctctgcttccgtcactcgatatgtaccttgccggatatatacagtatctcctgccatcacttttgattgtgctttacccaacgtggcaaaaggcttatcaatcgtcccactgtttgaatcgcttccattagtagccacaaaataattcgtagccgaaagagaaaagaggaaacatcctataaaaaaaagaagaaggctaatacgtttcattgtatattaagtattatgtagcagcaaagctactgttttttataccataggagctgtaatatcgtacgtaaagaatagaattttgtcttttctacttcaattatcagacaaattccagcattaacaatcatagttcataataacaatagtttgatataaggataaaaatgcatcctttatatacaaatttgcaggtgaatactctcccaatccacttcctttgtagaaagaaaatattcaatctttataacaatataattatgaaaaacttattttatgcgcttacattttttagttttgtcacagcttgtagtgataattcagtccaaaatccaacaccacctcccgtgtctgataatggtgataacaataatatgcaagttgttgagtttctaagaaatcgtgctatggtggcaagttataacactatctttcctaataaagaaacagaaagaatagaaagaaaaggcgtactactcagctggagatggctttccaccgatccggacgatattggttttgatatctaccgcaaagaaggtaactataaattccaaaagctaaacaaaactccgattatcaatagttctaattacaaagatttaacagcaaacattaataagattctcaaatacgaagttcgacaagcaaataccaataatattttatgttcatgtaactttactccggaaatggcacagaacttttaccggacggtcccattaaacaataataatctgccatatcccgatttagtatataaagcttcggatgcagctattggcgatttagacggcgacggagattatgaattggttctgaaacgtgaagtgtcacctcttgacaatggtagcacgggaattggaattactcccggaagttgcctgttagaagcatacaagctaacaaccgggacatttttatggcgtatcgatttaggctctaatatccggcaaggtattcattatactcccttcattgtatatgacctgaatggagatggcaaggcggagatcgcagtccgcacctccgaaggtaccgttttcggggacggaacgaaaataggcgatgtcaaccaagatggaataaccgactatgtagacagggctccccaaagtgccacttatggcagaattatcacagggccggaattcttatctatcattgaaggcagaaccggaaaggaagtagcccgaaccgactatatctaccgtggtgaaaaaaataaatgggtgacatattggggagataattgggcaaacaggatggatcgttttctgatgggagtcggacacttcagatctcaaaaaggaattccaagcctactcatgtgcagaggatattataagaactaccagattgtagctttagattttactgataacaaaataacagagcgatggcattttgatacagctgacaactattcggattatatagggcaaggtaatcataatttagcagtcggagatatagatgatgacggaaaagacgaagtcttatatggggcatgtgtcatagaccataacggtaaagggctatatagcacaaaattaggacatggtgatgccatgcatttgggcaaatttgatcctacacaggaagggtatcaagtagtagtctgccatgaagaacccaaggagtatggaaatattggaacagaattccgggatgccagaacgggcaggatattacattatattcccggaaacggcaaggacgtaggacgttgtatggtcgcagatgttgatccggacagtcccggatgtgaatattggtcgtcagaaccggacggtgtcatgtattcctgcaaaggaaatgaactgacaggtaaaagggcacctatagccaaaggtggtgatacatcatacaatatgacaatctggtggagtggatcattaaacaggcaaatgcttgattacctcgttattcacagctataccgacggacgtttgttcaatggcagcgattggggtgtaaaaacagccagcggaaccaaaaacaatgcctgtttttatggcgatatttggggagactggcgggaagaagttatcttcgttgatgaaaatgatacagagctaagaatctttactactgattttgaaaccgactatcgtttccatcctctaatggacgaccatttatatcgtttaagcgctacacatcagaacataggttacaaccagcccactcatccgggttactatatcggttctgacttgaacaaataaaaaagaaaggcgtgtatgctttccgcaaagaacatacacgctttttataaaactaaccctattcaaaactctatcatttccttacctcaataaatatcagaaagcaaatacatatcgggagcttactccaggtctgtcgtatttcaatccatcaactttggtacttccactgcttgtcaactgtactccaaatatacttgtattattacgctctgtagacgaccaataatacatgtcatttttcagtccgtcactacctgttatttttcccaactgcgtattcatcgtttcccaattagttaccattgccctcaaatcaccgacagaaggaataaaccaaccggaagaaatactcggagcaaccaaattatagttattcaaggaattcactaaaagtgacttattctttgcttccgcatattttttaattacttccgtgtgattataccctaatcgctgatccctcgacgtaccattcaatgttccggtagacgccgatccatcccatcccatcggacttaaatcaatataggaatttctttcggcaaactctgtacgataccaaactcttatttcatctttctccccaaaaacaatattggtattctctttcagccccaaaaccaatccatgggtacagcccggatgatcacgcaataatgcatcctgacgttcagaataagtaaattcattatcttctgtaaaaggatataacacagaaggcatcggattaccaacaaaataaacgactcctacacaatcatcgctaacaggagcattatcgtcaacagaagccaacgcgccattagaatatatcagatcacccactttcaactcatgatccacagtttgcagtcctccgtctatctcacaataaatatactctccggctttcaactttgtcgcatctatcgagtattttttaagcccgttgtctactgaactgataaaacttcctcctatttgctctactttttttgtcggatttaccaaaacacggtaagtcgttgtttccttatcataataaggaatgatcacctgctcaccaatagaaaatttcacctctctcaaagatacactgtaagatggcagttcaggagaaacctcattagtgaaattataagtaacagaaggcagttcggctaccatcaaggccatccgatgattcattacaaaagttattgtacttccgtctgctgaagcctcccctgtcattaaatcattatttgtatatctgtcaccactcagatctgtgtcaacagtccagttccccacaatcgtttcaaacggatcctccttcgtcatatctatagttatattttccttataaggataatacgcataaaaagtcacggtttccaaatcttccgtacacgaaagacgtcctccgtcaattccccatattccatcattatacgtcgcaaggacatttttaatgaaaacttccttatcactatttaccgcaaaaataccaatcgcatccccgtccgaaaaagttgtcttgtaagtcacatcagtgacagcacgacttacattgccattttgttgaatactggaatcaaccacctcaatctttaatatattactattgacggccagcttggcatcctcatcctgcgaacatgccaccatcagaaaagaaccgagcaatacataaattacaaaaatgaatttacaatatctcataatatttcttcttttaaatgtttaattatcatataactccatacttattgacctgcccccctgactcacaatagtttgagtatttcccccatcccattgtacatctcctggttcaactcctgtaatagtattaccgtcacttgtattaatttcctgacgatctccttcaacccatccctgaacttctccagattcgacagttacataaatcgtttcatccctctcactgattattacagtgtacggatgtatgtgtccgggaaccaggtccatctcaccaatcttcttgataaaagatttcccgcccatttctatctcaaaagtaacctctgaaactttttgaggaaatacaatcaatgaagtccgcatattttcaccggccataaccttctgagataacgccaaagccggtgcatcttcgacaacagcggtcgtgccgtctattgtattgaaagttcctttaagtttcaagccaatcaacgtataagttatgtcatccaacgtcaaaccgtcttttccttcaaaagaaaaatcaatcctgctcatctgatgcgaaaaagcaaagttgacatccggattgttccgtccggcttccgtagtcgcataaagaaaatcaatggacatttgcttttcctgtgtttgtttatccgaagtcgtttccactgttatacaatcggcaaccataacggaagtctccgtaaatggataataggcggacaatacatgttcctgttttcccaggaaataaatagactgattctcgtcaaatgctgcaaacgaagataaatttcctgtatatttataggaaatatttacatcatcttcacaagttacccctatacgatcaccatcagtccacgtagtaccaacagtccgggacttctccacaacctccgtgattgttcccgagattgccgctttcaccccgacgatatcatcgccggagtaatcatagctgctacatccccaacataagatagacaatgcagcaataaatggcatttttcttttcataagactataatttaacaagttatattttcggaataaagactgttattgtaatgttacgctcatcaatccaatcactacatcattagcaacggtttccaatgtcagttctttcagagtcttattcttgtccaacggaatatccagcatgacaccggcgccaccttcaaatctgcggtcggcagatccgcgaagtttcaaagcctttcccaaatcacgactcacgattcctgtttttaaatgaaaccgatacgggcgaggtctgggagcatcaaaagcaaaatcatccagataaaagtcctgctcaatcggacaccaattatcagggtttaccaattccagcacctctgaagttccatctgtataatatacacgtacaattccgttggctatccggcactgcatatgattggtgctccctacaagcaacaaataagcatgggaagcttttccagagagaggaaccttcaccatatccggataattatcccataaagaagtgtaagcgatattgttaccttctttcattacacggaaaggaataccaagtgaagttttatacatattatccttcaccaagctacgtaagccggaatcatcaatttcagcagtcagcaatggatggcaccattctccaattccctgagtcggtaactgcaaagttgtataaggagaacgtggagataaatactcatttttaaaaatatccgctacagaagaattaaactgcttatccatgtttaccacacgacatttaccagtttcaatattttcaaatccattgtatacgacttgaggaacattgacatagacattgacaggttgccaccattccatattcccttgacgagtgtacacaaagaaagtatgatgtcctttcttatctttattcactttcgacgaaagcttggttgtgtttaccttcttcgttaccagaacattttgcgggtcatatactttaagaaacgaaataccctgaggagcgttcaagtctacctgtccttccagcgtagtaacaatttcatcatttgcaatctgttgtaagacattaccttcccattgaatctcgatttcagctttggtgacagccggtacagaaacaacaatcagaggatacccattcgcagcttcttccgtcttccatttcacagcttttccattcacctttaccaaacggatcttatccttcactgcattcacttgcaacgtcaaggccaatggttctttgaaacgttgtgtcacattataaatatccatatcacccttacgtaagaattcataagctaaatcagccattgacatagacgccttatcccacgccataggaaatcccgggcggatcaccaattttccattcagagcatccggcgaaacgccatacaagccctgtatcaaagtgcgggatgttatacctatttggtctgcaaaatcacggtaagtttcccggcgaacagcatcatacaaacttatttgtccgaaattgccaggacttttcccaaggtacatcccatccagaatagaacctttcaacaaattaaaaccatcgtctccacgccctgcctgaaaaaaagcaagcgcagtatgcatcacctcggcaaacgccacattattcacactccacacataaggcatccagttcgtagtggataatgtttcataatcacgatccaacccatctgcaaataccggaatatgcggaatagaggtatcgacataccgggttgcctgataagcctggaaaggatcggctgtttcactatctatcgcgtgatagatagtccacaaaccagcgctttcatgtaaacgcttatgccccatgaaatcttgaaactcggcccaatgccctttatcttttatccaaagcctttcattcatcgctttcaatatcttatccgcctctttttcatagggagtagcatcttcccctatcttttcagccagcatagcggccaatttattagcacgatagttatacgctgacgaatgagttacagctccactgttataataaagtgcatcactggcccaaatacagcaataagcatcatacagcccgtcattatcagggtcataattcaatttttcccatgccagatgactagtcaatacaagccacattttacgtacatagtccaaatcgccggtccagttgaaatgccagagcaactcatcaatgtagcaaagattcatatcataatgatgcatttgatcctttcggtaaggagtacggcaaatatacccgttactgtaatgcggggtaccccatttttttaccgaacgtgccaaatgtaaagcagtatcctgtgtaggatgaggtattgtcgcagggacatccgtaacctgacttgctgcatacgaatcgaaatgcgtacgagccctatcatgccagccaataaaatcaccgatataagcagcacgccagccatttaattgcgaacgccagccaatagcgccgtgaagccatattttgccatcccatattccatcagcggcagccgccaaagcccctcccaatggattaaaatagggatccggagtagaaatctgaagagatgactctatctccgaacgccacttttcagacttatcgtatagggaagttccttcaacaagagctggtaaacgtaactcctgatcttccacaacaatataagcagtcgttccatccaaactcaatttataatgtttctgttctttcggaagttggggagcatcaaaactatcagcacgatcagcacccatatcaccattgcggcttaaattcttcgctctaatctctgaaatatagcaatgtaaaagagccccctccggcatatccttcattgtaaaccgccatatccctccttctgcgtcaggaaatgccagtacggagatatttaattcacctttgcccaacaaaggatctgtcagacgataagtacgccttcccgccctgtatctggcctcacaaaattttaaagaatcaagggctatactttgattaccacattgcaagcgaaaacagatatgcttactatccttcggcttataagtagcaaacacaggccggtcgctcgtttcaatcctaaagtctgtaatacctccgtacaatgcacgagtatagcgattcttgccgttcacacaaacaaaatcattaccatccggacgatattgtatagtacgttttatcccttttttacgttcaatttgggaaattgtctttgttatatgcgccccatctgtcgctgcttgtacaacaagtgagaacgcagagcacatcagaaaaccaatcaaacaacttttattcatattttcctatcctatatttattacatttacttcaatttttaacgatacgcttcattttgtacatacagcccctctttcactttcatctgcgaatcgggaataggatagagataagttccatcctttatttgccggatatacaataacaaagtcggacgtatgacattaccattggcatccactgcatattcctgaaatttatcacgaacagcttgaagattattatgacgtaccaaatcatgccaacggattccttcacaagccaactctctccgtctctccttgtcaacacattcccggaatgcagccggttccttttcggcatttgtcaataccggtattcctgcacgccgccgtatcctgtcgaccatatcaaccccttttgaagttggacctacaatctcggcatacatcaacatcacatcttccaaacgaatcaacgggaaattcagagggaaataagtacgatccactatctgcgcattaatatcatcataccccaatgcttctcttttcattttatgttccaggaatttgataaagaaatcctcacctgcatatttcgtcacactattaggattgtcatcattcacaaacttggtcgtatcaatagtagccagacaccgtacatcaagaaaatgtccttcttcatcttgttcctctttcaataaattatcaagccccttcgcacaagcaatactattaccggacatttcaagagtaacatatttcgaaggtaaacgaggcacggagtgaaataccatcggattaccataatctttagcgactatatattgaatttcaaagatgtgatatttattatcattctcatttatccacattctttgccattcacttgcatttttagcccaaaatttaccggttgcatccgcataatcaattacttcttcaagaagctccctagcgagttcctttttagtttcatcatacagaggaaatcccgccattgtcagataaactcttcctaacaatgcctttgccgcagtcaatgttgcacggccactggcggatttccttcctagataatccttcggttcctccgtcaggcttccgacagcatattccaaatcaggaataataaccttctcataaatttctacagcctccgactgcggagtcgacattgcttctgaaatagtctgaggaacaagcgtcaaaggaacacgcccgtaataacgaaccaaatcaaaataagctaatgctctcaaaaaacgcgcttctcctatttgttgttcctttattccttcaatagtataattcaccccatctaccttggacaaaaacaaattggcacgcgaaacaatctcaaacaagtcattccatgcatcccgaactgttgcaatggtcgatatattagggttaaaagaactgatgtccatatagtcacgctgtgccgtactcagttctccgcaccatgtattatccgaacgaacctctgacataagtaaagcataagtcgacaacggaagcagtccgttatatactcctatcaacgcttgctccatttgcgacggggtcgtataaaagttttcagtagtacgggtatctaccggagtgacatctagccagtcactacaagaagagaataacaatcccatactcatagctccacttagtatatattgatatagtttcatagtttcttttattagaatgttacatttacccctaaagtaatagttctagcctgcggatatgaaccgtaatcatagtcactattctttccgtcattatttacttccggagaataaccaccttcatatttatcccacatcagaagattttctcccgaaatataaacacgggcataattaattatcttcttatttttgatgggaatacgatagcccagcgttacgtttttaattttaataaaatcggtactatacaaccagcgggtatcgtacagtgaacctgtattagagttattaataccgggagttttcccatcacccggctgttcctcggaaacccacatattttcccaacgtgacaatacattgatagatgctcccatacccggacgatccatgccacgaccgagcagactatatatcattccccctgtctgtccagtcagtaatacagacaggtcgaaatctttatatttaaaggtatttgtcataccaaaagtataatcgggatccggtttaccaaccaacgtacgatcctggtcattaatcttaccgtcatcattcacatcacggtatctcacatcaccctggatagaattggacattgtaggatatttcctcaaatcttccttatactgatacactcctacagcatcatacatataatatgccctcaaaggttgtccaaccatcaatacctgtgtattcgatttatcccatccaatgaaaaccgtactattatcttctcccaaactcaacaccttattcttattataagctatattcaaagaagtagtccacttgaaccttcctgtcaagttttgggtagtcagttcaatctcaaaccctttattttttatactaccgatattcccccatgcttgtgtgaatcccattgtaccaggaacagaaacctgatataataaatctttagtcgttttatcataataatcggcagcaagagttatcctgttatcaaaaaatcccaaatccaaaccaacattccaactgtgtgtcttttcccatccaagttctttattatcaattgaacagggagcaaaaccattggtcaggcttccaccaattgaatagttggaactacccatcagcccgatagcagcgttagtagaaatagaattatttccattcataccccagctaccgcgtattttcatttgattgaccacaaacttttccggccaaaacttctcgttagagattcgataggcagcagaaacagcaggaaacatcccccaacgattattctttccgaaacgtgaagaaccgtcgcgacgaatacttgctgtcaacaggtaacggttatcatattcatactgggcacgcccgaaataggataataagcgattgggagttgacaaggtagctaacgcaacttttatagcctcatcactttggttgaaaacttcaagtgaattatccgggaactgttgcgcagacaagtttgtagtggctcccgaagaactttccattgaataacctgccatagcggcaatattatgcttgcctaatttcttatcataatttaatacagcctgcaacagatatttggatgaccgtatatctatacggttggcagaactatgatacccttcaccatccgtccagttcttaattaccgaactcggagtaaaagtgcgagtctgacggcttgtaaaatcatacgcacctttcacttccgccctcaatccgtcaataatattgactctgataaaagctgaagaattcaaccgggccgtttcgatatgattggtgacctgctccatataagcaatagggctgatttttgtactagaccataaataagaggcataaggttccgcaccggaatatatcccagcatctggctctgcaactggacacattgtcaaaacctgatttgcctgctgatctttgccatccacacgcccaccatctttccagtccattgacggagccatattaacgcctaaagtgatgcgatcatacaattttgtctccacattagcccgcagattcaaacgtttgtaagcactctctatagcaataccttgctggtctatatatcccagagaaagccggtattgagtattccctctaccatttgaaacagaaagctgataattctgcatcggagccaaacgataaaattcatcctgccagtcaattagtcttaatccaccgtaaccgggctgtgtccatcgcgggtcattcatatactcatagtttacccgattaccattcaaggcataacgggtatcccaatcatcatctgccgtagctccttttcctcctaaagcagcaaggtatctactattgttataggcagtccggaaagtgatccactcttccgggcttagtacatctattttcttttccaattgttggatactgaatgcagcagaaaactgtacccggactttatcatccttattagccattttagttgtaatcaaaacaacaccattagcaccacgagaaccgtaaatagcagaagatgaagcgtctttcaaaacttcaatcgactgaatatcatttgggttgatacttcccaaatcatctatcggaattccatctactacatataaaggagtggcatccgcattaatggaagcagctccgcgcacacgaatctgtaattctgatcccggcgcaccattagttgaccgtacttctactcccgccaactgcccctgcaatgaagaggcaagattgggtgccggacggtcttcaagtttcgctgcatcaactttggcaatggccccggtcacattcccccttttggctgtaccataaccgattacaaccacttcgtccatttgcacgtcattttcgctcatcctgatggcaaaaacactctttcctttaatagaaatagtctgtgaagcatatcccaaataagacacctcaattgtcttagctttatcaggaactgtaagagtaaatttgccatccacattggtaattgtcattccagacttcccttctgctacaatagttgccccgatcaacggttcatttcgttcatcaaccaccgtaccggatatggtacgtttttgtgcaaatactgtgaccgaatggagagccgaaatcatcatcaagaagaaaaatatatattttcttctccaacagctaatctcacaaacagtgcttttcatacattctagttttcatttaataatattagttttatacaatctcataaaccatggtaatacaaaatccagttatcaattcaacagcaaatatagcggcatacatgaagctgctcatgcatttttctccatataccatgcacatttgtccacctgaacattcttatatagtccctctttctttttttcaggttattcaagaaattcaatgcaaaagtctgaatttaaactttaaaattacgtgctatttatctatctttaccgcaaatctaaaaaaacacaatcattattatcactatacaagtatgagattcttcattaaagctacaattttcttttttatatgtacatgtattatatatccggcaaacgcctccatagaaatacatgctaggaatctgactgccactgacggattagccaataattctatcaggcatatctatcaagacagcaaaggattcatttggttttctactttaaatggcctgagccgttatgatggaaattcatttgttactttccgtccccagagcggtgaagaactgtcattagcggatcatcgtatcagaagtgtacaggaagactctgacggattcctatggattacaacttccgcggaacaaatcagttgttatgatttgaaaaaagactgttttgtagatttcaccggcaaaggagaaatgaaagaccgttataatgaagtcacaatcctccctaataaggatatatggctttggggaagggtgcaaggctgccggaaaattacttataaaaacaacaaattcagttcggaaacatattctaccgacaaccataaactaaaatccgacaatatacgttttcttagtgtatttgattcaaattccatttggattggtacaggaaaagggctgtatttacttaaagataacacgctcgaatgtatagattcgactcactacttccttcaaagcgcagtcattgataatactatttatttcataacatcagagggatttatttggaaatacaaccagcagcacctcacgaaagttgccaatactgccacatcaactgattttttgctaacaggcaatattgtattacgtaacgaatggctgttatttaccaaacaaggcggaatcttattcaatcccaagaccaatacaaccagaattgctccggaagagctcaatatccgtaatggattggtagtgaaagataaccgcaacaactactgggttcataatcagactggatacattaactatattcaaaaagaatccggtagtgtcaaaaagattgatgtaagatcgtcaaagcttccatatttcattgattacgaacgctatcatgtctatcatgactccagagacattatatggataacgacttatgggaacggactttttgcctataatcctactactaaagaactggaacattttaccgcaaccgccaatcatacaaatcccatcgcctcaaactatcttcaatatataatagaagatcactcgggcaatttatggacaagtagcgaatattccggtatatcccaaattgaaatcataaataaaggggctgcaaaagtatatcccgaaggtgaattaaatatcgacagggcaaatgccatccgcttcatatcccacatgcaagatgacgaagtatggataacaacgcgtgcaggcggattatatatctacgataataaactaacaaaacagaaaagcaaaaagtattatgatataaatatctattctgcatgtgaggatagtaaaggtaatatatggttgggaacacgcgggaaagggctccaagtcggagacgaccaacactatatacatcaggcaaccgatacaaattccttagctgccgatccagtattctgcattttgcaagaccgcaaacaacgtatgtggataggaacgttcggcggaggacttgatctcgctgttcctaaaaaagacaaatacatattccggcattttttcaataagacttatggccaaaaggaaatccgcactatctgcgaagaccgtaacggatggatatgggtaggaaccagtgaaggtgtttttgtattcgatcctgaccgtattataaaagacccgaacgatttttaccaatacaatctggataaccatgccctgaaaagcaatgaaataaaatcaattatacaagataagaaaggcaggatatggattgccgaatcaggtatcggattttgcgtagccaatataaagaatgattataaagatatatcctttactcactatacggtcaatgatggacttgtccacagtgtagtacaagctttcattgaagatgatgaaggaaatatctgggtatccaccgaatatgggatttcttgttttaacccggaaaacaaaatattcaacaattacttcttttctaatgatatattggggaatgtatatacagaaggatgtgccaaattaaaagatggtcgtttggctttcggcaccaaccacggacttataatactcaatactaagcaaattaaaaacaaagagaaaattccgtccgttacatttacagacttaaagttaaacggaatatcagtccgtcctgccgatatggactctccattgacagccgctctggcatatacagatgccatcagtctgaaatattaccaaagttcctttgtcatagacttctccacttttgactatcccatttcgactaatacaaggttcagctacaaacttgaaggatatgacgatgactggagtattccttctacattaaactttgcagcttataaaaacttaccggcaggtacctactatctacatgtcaaagcctgcagcgtatcaggtatatggagtgataacgaggagacacttgaaatcaaagtaactccccctttttgggcaaccggatgggctttctttgtttacatactcattgcaggcattatcatgtattttgtatatcgtactatcaggaatattaacaacttgcggaataaaattaaagtagaaaagcaattaacagaatacaagttagtatttttcaccaatatctcacatgaattcagaactccgcttacactaatacaaggggctttggacagaatccaccgtacccacaatatccccaaggagatacgttactctatcaaactaatggacaaaagtacccagcgtatgctgcgtctgatcaaccaattacttgaattccggaaaatgcagaacaacaaactcgccctttcacttgaagaaactgacgttatcgctttcttatatgaaatctacctaagctttcaggatacagccgaatccaagaatatggatttcaaatttataccatccgtcaattcatacaaaatgtatattgataaaggtaatatcgacaaaatcgcctacaatcttttatcaaatgctttcaaatatactccttccggtggaaagatagaattcagcatttatattgataaacagaaacagctattaatcatgaaagtaacggatacaggtgtaggcatacccaaagaaaaacgtaatgagctgtttaaacgtttcatgcaaagcagtttttctagcgacagtataggagtaggtttacatcttacccatgaactggttcatgttcacaaagggaacatctgctatgaagaaaatccgtcaggtggttctattttcattgtaactttacctactgattcttccatttatcaatctaacgacttccttattcctgaaaatgccatattaaaagaagaagcacaaaaccatccttcgctttctgctcttaatgaggaaaatgctcactctgaatcagaagaagaaatagataaagaagtagaaaatatagagaaagaactaaaaacagaactgaacgcatctgatcaagagggtcctctaaacaaacggaaaatacttattatcgaggatgacaatgacgtacgggaattcttgaaagaagaactgaccccatatttcgaggttgctgccgaagcggatggaaaaaatggtctggagtatgcccataataatgatatagacctcattatcagcgatgtcatgatgcctggatataatggtttcgagataacccgtaaactaaaaagtgactttagtaccagtcatattcctataatcctacttacagccctgaatgcagcggaaagccatctggaaggagtgaaaagcggtgcagactcttacataacaaaacctttcagtaccaaactgttactggcaagcatattcaaactgatagaacagcgtgacaaactaaaggagaagttttccaatgacttgtcagccaaacgtcctgtgatgtgtacatcggataaagacaaggagtttgtcgaaaatctgaccaagatagtggaagaacaactgactaaccctgaatttactgccgatgattttgcttctatgatgtcactgggtcgcaccatcttttaccgtaaagtgcgtggagtgaccggatatactcccaaagaatatcttcgtatcatgcgaatgaagaaagctgctgaattgttgtcaaccaagaaatataccgtatctgaagtaacttatatggtcggcatcaatgacccgttctatttcagcagatgttttaaggctcaatttggcatctctccttccagttatcagaaaagataccaagagggcataagagaaacagaaataaacgaagattaataaatatatttatgtgtttgtgaacatatgtacatgtttaatggaattttttcactagtcggaataaaaagttcagactaattttgtctcagaaaaaattatcaacacatttaattatagcattatgaaaagatcagtattaattttaagcctggcagcctttgtattatcaagcaacgcacaagtattaaaaagcaatctgctaaatggatataaacaaggtgataaattggaaaaagctacatataataaagctgatgctccgataaaaatagatacctggtgtgaagcattctcttcccaaactgacaagaatgccggtagtcccattaccggacaagagctcagttatgagggatatacggaaaaaggagtatctatcaaaataggagaactcccggaaaatgtgaaaggttcaagatttagcgtatattccatttctgaaaagaatgactattgcaggggaactttatacctttcatttttggcaaacttttcctccgtcgcttccagtcgcttaggcgatttcattgctctttcccctgttcatactggcggtaatctgcgtgccagagtatatgtcggtaagatagacgatgaacatatccgattcgggactaatctgttaagagttaatgcagaatccttcaaaagccatgcgcttaataagacgcatctattggttctcaaactggattataaaaagaacgaggtttcattatttgtagacccagccttaacagcagaagaacctcaacccgatgtggtagcgaagggggacgaagataataacaaattaaaaggggggattcgttctatttcatttaggaaccgcgatgatttgaccggaaatgtcggtaacttccgcttctcttccagttgggcaggtgtgatagctcaataaaaatctatttttattattgcattatgatgtaatatggagcattgaattgtgtacaatgctccattgtttttacaatcatgtcacttaaattcacttctgtcattttacatcataataagtattatcctcctccttcacataaagaaaaaaaatgacttatctttaatagacaagctttctgtttttaataaactattgaggagtttattaaaaacggtatccaagtttattataaattataaatttcgattttaaggttctccctgtactttttcataacaaaaaagactgcgaaccttataaagatttgcagcctttagcttatacggtaactctcacagcttaactattgtaaggagcttctgatatattgttataatattgtactattctattttcattcttttttaaattctttatccattaatctttccgcttgcaaatatacaaaattaaaaaggctttgtcaagagtgcgctactataagaaaaagtatttgtaacaaagttccatatctaataccttacaaccataatatcgctatttgtggataaaactacatacaaaatggaattttttcatcatagctatttgcagaatcaacctaattttgtcatacaggtctaaaagaattattaatcatatataaatatcacagaaattatgaaacacatccttttttatgcattattctttattttaaagattgcgtcggcacaagcccaaagtcttgaccagccgaagaactatccagcagatgctatttcttcttttgctgaacgtctggaacctatgggacgcatcttggaagacgataattattatgtgtggtgttgtgcaccaattatagatgaaaagaataaagtacatgtattttattcacgttgggaaaaaaagtatgaaatgaaaggatggctggggcattgtgaaatcgcacacgccgtagccgaccaaccggaaggcccatacaaatatgtatcaacagtactgtccccccgcccgggctattttgatggtaatacatgtcacaatccaagcatttataaaatagacggtcgttactggctattttacatgggagcaaccaatggtaaatttggaacgaaacgtatcggatacgctgtagcaaactctatttggggaccgtgggaaagatgcgaaaaaccattattaatgcctggaaatacaggtgaatgggatgattatattaccactaatccagctttcttaaaacatccggacggaaaatactggctttattataaatcttgtaatgaaaatgaatatgtgaaccaacatatcaatggtatttcaggtaaccggaaatatggggtagcttttgcagataaaatcacaggaccttatcgacgatatgaaaaaaatccgatcgtcgatttctccggtttcggagaaaacaggcaagtagaagatgcgtatatctggtatgaaaacggtatattcaaaatgttaatgagagatatggggttctacgaccatacagtggggctctatttcgaatccaaagacgggctgaactggcaaaaccctcaaattggttggtttggagcagagcattatatcaaacaaccacccgctcctaaacatctcaaacgttatggacgtttcgaacgcctgcaagtactaatgaaaaatggaaaaccggcttaccttttcacggcttcccaagggggaaaagcagaaacatcttcaggtttcgtctttaaaatcaagcccgaataaacgaacatagaacttaaagtacacttataaaaaactgttatgaaaaaaattatattgatattatttaccttgttgcaattcccggcaaacgcaaaagacttgcctcactcctcctattggcacggagaagaaagaactcttcgatataaacccgaaggagaagagtttgtaataaccaatggaaataaaagatttactagagctatttatggaactaataccggctttcgttttgaaaccagtgacttccccgaattcggactttacatgcctaacctcggtggaagtgtatatatggctatatctaccccctcaaatattacttggataaaagatatggaattcattgaatctcgttttaaatccgggcaacgcacctacattgtgagagacaggagacatctaggaaacggcagtctgacaattgatgctgtagctatgtccgatggcgatggattagtagtaagatacaaagccaaagacatccctgccggcactaaaatcttgtggatatatggggggagccaacaatcagaaattcggacgtgagggagacttgaattccgacccagccgattgttttttcattaaagccaacaattgttccggaaatatatatcaaattaatcaaaacaaatttacgatacaatacgggcaccacaccagcaacagagcctctcaacataaagtaatgtccatagcaggaacctttcctatcggaactgatataaaagaagtggatggaaaccttattgaccaattggacgaacttatcacatcccgcaaatcaaacaaaccggttatcatagcaaaatatccggttagtaccattcctttctatattgaactgcacaaccctaaaagtcatagtgagtttcaatataatgatctcagtaatgttttcaacaaaggtgttgagttcagaacccaaatagcttccagaatcaaaataaaaacacctgatccatttctgaacacattaggaggcaccttctctggagcggaagatgctgtatggcaatctccatcgtatctacatggagccatctgtttccgcgaattacttcttaccggttggagaggggcttatctcgcagacttgatgggattagaagatagggcaaaaactcactttaacggttatcttaattcgcaagttatagatgttcccgtcacattaccccatcttcaggacacagccctaaacctcgcacggtctgcaaaaatatggggaacccccatgtatagtaatggttatataggaagagttcctaatagaagagacgtcatgcatcattatgatatgaatctagtctttatagaccaactgttgtggcatctcaaatggaccggagatcttgattacgcacgagaaatatatcctgccctccaacgtcactttacatgggaaaaaaaactattcgaccccgataacgacgggttatatgatgcctatgcttgtatctgggcttcagacgcattacaatacaatggcggtaaagtgacacattctactgcatataactaccgggcaaataaaataatggcagaaatatccgaaaaattaggaaaagatccaagcatatacaaaaaagaagcagaacttatattatctgccataaacaaagaattatggataaaagacaaaggatggtgggcggagtttaaagataatatgggaaaccggatacgacatgacaacgctgccatatggactatttatcatgcaatagattctgatatacatgatcccttcaaggcatatcaggcaacccgatatatagatacggaaatcccccacatccccgtcatgggaaaaggtttgaaggatactgccaattatgtgatttcaacaacaaactggcaaccttatatgtggtctatcaacaatgtcgctttcggagaaatctcacataccgcccttgcttattggcaaacaggacgttatgaagaggctttcaaaatgttcaaaggagctgttctggatgcgatgtaccttggttcaggtccgggaaatgtcacacaattgtcattctatgacgcagcccgcagagagacatatcgtgattttgccgatggaatagcgacaggggtacgtgctcttgtacagggtatgtacggtatcatgccagatcttattaataatagactaacgataagacccggattcccccgatgattggaattttgcagaaattgaaactcaaaatatggcatatacttttgaaaggaaaggcaatatagaaaggtattctataactcctaatttactcaaaaaagatgtcagcttgtcaatggaaataaaagctataagaaacaaaattaaatctatcaaagtaaatggaaaagatacaccctatactttacttacaaccactattttatctccagaaattaagtttgaggcaggaatagctgacaaatacgatatcacgatagaatgggacggagaaaaaataaacagagacatgatatctgtcaatgtagccaatggcagccagttcagactaaatattccttataaatcaggaaaaatatatgacccgcaaaacgttctgcgtcatgcaaacttaaagaatgacatactaaccggcactataaccgctcaaaacggacatcgcactgtatttgtcaatatcaccaatggaaatatgaattattggcttcccatagatataaatgtcaacaatccgcttgatatcgtttgtgattctgaatcttcttctcttatttttaccttgaaaaacaatatggataaagtgataaaaggtgatttgtatatcaatggtaaaaaggtgaatgaaaacatcaatatagaagctcatggaaaaaacaactatgaatttgatattcccattgcatcttcaggaactaatagaataaaagtcaaatccggaaaagacacttactcttttcgagccatcaattggaatatctctgtaccggaaaaatcagtttataagacggtagacatgaagaaaatatttaatgacaaagtaagtaatatattcgcttatggaaaatatatgttcccaagatggaaatacaccacattacaagttccgacccaaggtatgggacaatggtgtcatcctcaaagtatttctgttattgatgaccgtggaataagaaataaggcttcaagaaataacaatagattcattatgccacaaggaatacctttcagtactccaggagaaaaagaatataataatattgcattcaccacattatgggataactacccgacttccattaatataccactaaacggtaaagcttctaaagcctatttcctcattgcagcttccacttattatatgcaatctcatatagtaaatggcgaaatcaaaatagaatatacagatggacaaaaagaagtactgaaacttatattaccagataatttaattcctttagatcaggatatattcgtagatggatatgctttcaacactaaagatccacgtccgtggagagtacgccttaaaacaggtgatgtaagcaaatatcatgcaggcgaacttggaaaaacaatatcgaacaacccgatatctattgatggtggtatggctacaatgcttgatctgccactcaatccagttaaagaattaaaatcattatctttggagacgacagccaatgaagtcgtgataggattgatgggagtaacgctagtcaaatagccacagaatgagggtgatcaatgatacaccctcattctatatatttctggacactgtccataatattcctactgataactgatttctattttactatcaatattgtattcttgtcttacttgactcttatcttccacttccaaataaatttcacttaatcgaactttttttccatacactatctttcccgctgttttcacttgtgctcgaatattaaatagatagaagttctcaatacgtaaactatcattccaccccgaagctgtaatgaaacatttagatcttttcgctcttacatgagagaaataaacattgcgaaagtgtggataccctttttctttaggttctactggagtcagcattattttccaatgtgcaggaatctccctactttcatattctacaggtaatttcgaataactatattttggatgccagttcaaatccacctccaatacattagatacactatcagcctcaactcctgtgacataaatattctctactgtcccaccacgattcatagacgatttaagccgtaatacagatcctgtgccatacgctatcagatcatgagccagtacattacgaatagaaccggaagtctcacttccgcaagtcagtaaccctgcacctttacgggcaatacagttacgaaccaccacattctccgtgggacgattcacacgcagtccgtcggcgtcacgccctgccttaatacaaatattatcatcgttgcaatccacatcacagttttctaccagaatattggtagatgaatcaatatcaatgccatccgtacttggtccgtgacctcctacattattattaatagtaagtccgctcaccgaacaatgatccgaatacaaaatctgacaagcccagaatcccgtacgcaccaacgtaaagtctttcaacgtgatatgcttgctgttggaaaccagtactcccctcacccgcttgcaatcataatccacaatccaacgcagattcttcttctcatattcctcccgcatcgcccaatatttatcccagaatacttttccgcggcaatcgataaaaccttcccccgtaagagcggcattttccgcatccattatattgataacggccgaaggccatgtcatttcgataccggcaatgcgggaaggaaattccggatagtcctgaatattatcactcgcaagcaaggtagtacctttactaagatgcagattcacaccactcttgataaacaaagcacctattttataataccccggggcaacaactaccgtacctcctccctgttggtgacaagcatcaatagcggcctggatagcaggagtactgaatacggaagtgtcattccgcaacccgaactttccggcatcccattctgtgttttccggagtcctctgcgcccccacctgatcggcccacgacaaatccggctctgcagatacacttccccaatcataagcaggaatcgtctttttcggagttgtaaaaccaatcaaggccaatagtacaatagataaaagatacttcataattacttcttttagttcacgttgcaaaattatcgcatatcatcaaagaggtaatggacagatgtacgcaaaagatagaatattatatcatacggacaattaacttgaaagggtgcacaattgtatatagtctttgtacatttctccatttcatacatcacaaaaaggagtaattttgcgagtgaataaatacaataaggtccaaaccgataaaacaaatatgagaagaattgcaatttatctattgtgcatattcatgttactgcctgttgtaacaatgacagcacaacctggttataactactcaaagttacaacgggagaaactaaaccgcggcgtagttgccattcgcgaaaacccttcagaagtaatcgtttcgtggaggtatctttcttccgatccgatacaaaccggtttcaacgtatacagagacgggaagaaattgacagacactcccatcactgtcagcaccctgttccgtgataagaataacagtcagaaaacggctgtttacgaagtgcgtcctgttctaaaaggaaaggagacgcatcacattgacggtacatacacattcccggaaaacgcgcctctcggctatctggaaattcccctgcaaaaaccggcagacggaataactccggcaggcgatacctacacgtacagtcccaatgatgcttccatcggtgacgtagacggtgacggcgaatacgaaattatcctcaaatgggatcccagcaattcacacgacaatgcacacgaaggttatacaggcgaagtatacatcgattgttaccgaatgaacggagaacaactatggcgtatcaacttgggtaaaaacatacgtgcaggagctcattatactcaattcatggtgtacgatctggatggtgacggcaaagcggaagtagtgatgcggactgccgacggaacagtggacggaaaaggaaaagtaattggaaatgctgatgcagactatcgcgaagccggtacttttgacccaagcaggaatcaaatgatgaagcaaggacgtattctgaaaggcaaagaatacctgactgttttttcaggagacaccggtgaagccttacataccatcgactatatccctgcccgcggcaacgttgccgactggggagacgcaaaaggtaaccgaagcgaccgcttcctggcttgtgtagcctatcttgacggagtacacccaagtgttgtcatgtgccgaggctactacacacgcaccgttctggcggccttcgactggaacggaaaagaactgaagaaccgatgggtattcgacagcaaccatcccggatgcgagcagtacgccggacaaggaaaccacaatctgcgtgtaggcgatgtggatggtgacggatgcgacgaaattatttacggttcctgtgctatcgaccacaacggcaaaggactttattctacccgaatgggacatggagacgccatccacctgacacattttgacccttcccgtaaaggtctgcaagtatgggactgccacgaaaacaaacgtgacggaagtacgtacagagatgccgccaccggagaagtgttattacagataaaaagcaataccgatgtaggacgttgtatggccgccgacattgacccgactcatccgggtgtggaaatgtggtcaggagattcacaaggaattcgaaacgtaaaaggagaaatcatagcccctaaaatgagaaatatgccgaccaatatggctgtctggtgggatggagacctattacgcgaactattggatagaaacatgattattaaatacgactgggaaaacaaaaagtttgttccgcttgtcaaattcacaggaactcttttcaacaatggaacgaaatcgaatccttgtctccaaggtgacattataggcgattggcgggaagaagtactcgtacgctccgagaacaacgctgctctccggctctacgtttcgactattccgaccgaatacagattccacaccttccttgaagaaccgatatacagaatcagtatcgctacccaaaatgtaggctataaccagccaacacaaccgggattctatttcggaccggaccttataaaaatgaaaggtactttcagaggatatcaattcaagtaagttaagagactatcatgaaacacaaattatttcttttcacatttctcctggctatactgtccgccattaatatacaggcatccgaacgcaaaaaatacaatttcaacagcgaatggaagctgcggataggagactttcctaaagccaaagatacaaaattcgacgacagtaaatggaaacaagtaactttgccccatgccttcaatgaagatgaagcattcaaactttccattgaacaattgacagatacagtggtatggtatcgcaagagtttccagattccggaactgaaaagtaatcagaaagtattcgtcgaatttgaaggagtacgccaacgcggagacttctatcttaacggacattatctaggcagacacgaaaacggtgttatggcggtagggttcgacctgactccacatatcaaagagggtgagaacgtgattgccgttcgcaccgacaacgactggatgtacagagaagaaggaactaactctaagttccagtggaacgaccgcaatttcaatgccaactatggcggtattcctaaaaacgtcttcttgtacgttactgataatgtatatcagactcttcccctatatagcaacctgaaaacgacaggcgtatacgtctatgcccaagacttcgacatccaaggacgcaaagctacgattcatgccgaatcggaagtcagaaatgacagtaaagctacccggcaattcagctatcaggtgactatacttgatgccgacggcaaactaatgaaaactttccaaggtgataaagtgactttgaaagccggagagactaagacggtaaaagcatctgccatccttcataatcttcacttctggagttggggatatggttacttgtatacggtaaaaaccgctttgaaagatgataataatcagatattcgacgaagtcagtacccgcaccggcttccgcaagacccgcttcgcggaaggaaagatatggttgaacgaccgtgttatccaaatgaaagggtatgcacagcgcaccagcaacgaatggccggcagtaggtctgtccgtacctgcctggttgagcgatttttctaatgacctgatggtgaaaggaaacgcgaatctggttcgctggatgcacgctactccgtggaaacaggatgtagaatcctgcgaccgtgtaggtctgatacaggcaatgcctgccggagatgcagaaaaagaccgtgaaggacgtcaatgggaacaacgggtggagttgatgcgagacgcgattatctacaaccgtaataatccgagtatcctgttctacgaatgtggcaacaaagccatcagccgcgaacacatgatagaaatgaaagctgtccgcgacaaatacgacccgttcggcggacgtgccatcggatcacgtgaaatgttggatatccgcgaagcggaatacggtggcgaaatgctgtacatcaacagaagcgaacatcatccgatgtgggcgaccgaatattgccgcgacgaaggtttaagaaagtactgggatgaatatagctatcctttccacaaagaaggtgacggaccactttataaaggacaaccggccactgactataaccgcaaccaagatgaacttgccatcaccatgatagcccgctggtatgattattggcgtgagcgtcccggaacgggtaacagagtcagctccggcggtactaaaattatcttctccgacaccaatacccactaccggggtgcggaaaactaccgaagaagtggagtgacggacgcgatgcgtatcgaaaaagatgctttctacgcacatcaggtaatgtgggacggatgggtagatacggaaaaagaccagacctacatcatcggacactggaactatccggataatacggtaaaacctgtgcaggtagtatctaccggagaagaggtggagcttttcctgaatggtaactccctgggtaaaggcaaacgccaatacaattttctctttactttcgacaacgtagccttcaaaccgggcaaactggaagctgtcagctacaataaagcagggaaagaaatcagtcgttatgctgtaaatacagccggtgaacctgccagtctgaaacttaccgctatccaaaaccccgaaggctttcatgcagacggtgcggatatgacattgatacaggtggaagtggtagataaagacggacaacgttgtccgttggacaaccgcactattcagttcacactcaagggtcaggcggaatggcgcggaggtattgctcaaggtaaaaacaatcatattcttgatacaaaccttccggtagaatgtggtatcaaccgcgcactgatccgcagcacgacggctgccggaaaagtaactctgacagcacaggctaaaggacttctaagtgcctctctcacattggaaacggtgcctgtaaaagtgaccggaggtttgagtacctatcttccgcaggccactttgaaaggcagactggatagaggagaaacaccttctaccccttcttacaaagacagcaaaaagggtgtacgaatcgtttcggcaaaagccggttccaacaataatgatgctgaaaaaagctacgatgatatcgaactgaccgaatggaagaatgacggtaaactaagcactgcatggattacctatacattggaaagagatgccgaaatagacgatatatgcatcaaactgcaaggatggcgttcacgaagttacccgctggaagtatatgccggcaacaccttgatttggagcggaaacacggataaaagcctgggatatattcatctcaatgtagaaaagcccgtacgtgctaatacgataaccatccgcttgaaaggaaacaccagtgacaaagatgctttcggacagattatcgaagtagaggctatagcggccaatacaatggaattggaaaaaagcagtagcaaacaccagttgagaatcatcgaagttgagtttctcgaaacaatcaaataaaaaagttccggcaatgttgtttatttgcctgccatcaagtatctttgttcataaactgaattttaacgcttatgtgtaaacaaccggatatcctagaaagtgaaaagattcactttgcagtcatggcaatagaagctggagcacgcgaaatgggaatttctcctatggaaatgcgccgacgtttagagaaaatgaatctaatcaaacgtcttctactggacaattacgaagtgatgcacacacaaagtctaaaacatgtaggcgaggatgtggtcgaggctttgaagaactgggaggcacaggagggcgagaagggatgaaaataacactttatcatggctccaccctttctatagagcatcccttagccaaagtgggacgtgccgatttagatttcggtagaggtttttatctaacctcactacgctcacaagcagaacagtgggctgcccgcgtacaactattacgggcaagtactactgcatggattaatgtatacgaatttgatatggatgcagctataaaagctggattcaagctacttcgttttgatgcttacgatcagcattggttgaattttattgtcgctagtaggaatggaaaacagccttggaaagattatgatattatagaaggaggcgtagcaaacgatcgggttattgacaccatagaagattaccttaacgacattatcaccatagagcaagccctcgggcaattggtatatgcacaacctaatcatcagatatgtttgctcaatcagcaactcattgatacatatctacattttgataatagttttccactggatactatggacagaaaaggaggtaacaaatgagagaacaagtactttggagaaaaatcagtcgcatcgtcctattattatcagcccgattggagataagcccggaaagagcattaaatctgttttatgaaacgaatgtatgtgccatgttacatgactcccgttacggactgcatctaatgagtgatacttatattataaatgatgtattgcgtgaattacaagacaagcagtaattttagaatatattatgataccaagcaaacaaaatctcttcttttcataccgttcctttttgaatccttatcactcatttttttcatttattccttcattattcacaccacgctgataaaccgatggtgccaccccaaactgtgctttaaagcatttgctgaaataaaaaggatcactgatgcctaccttgtaagagacttccgcaaccgttagattatcttctgacagcaacaactccgccgctttcttcattcgcaccacacgcaaatattcattaggcgaatatcctgttacgccgcgtaatttccgataaaaaacggttcgtcccaacttcataagctgcgcaaactcatcaatagaaaattccgggcgggcaagattctgttcgagaatggcagccaagcggtctgcaaattctttatcccgttcggtagtacacatagccggtcgcacaatacccggttcgttggagaacttctcacgcaatttatcacgctgttcgatcaaacggaatacacgtgccaacagcagtttaacgctgaatggtttggcgatgtatgcatccgcacctgcctcaattccttccagatgcttttccggtgagttcaacgcagtcagaaggataatgggaatatgactcgtatcaaaatctgtttttagtttcttggtcacttcaaatccggtcattcccggcatcagaacatcacagataatcaggtcggcatcatacgtacgggccttttcaaatccggacgtgccgtcggcagccacttccacttcaaagtatgcgccaatttcttcccgtagaaactcacggatatcattatcatcttcaataatcagcactttccgtttgttcaaaggagcagccatcttttccgggtcaggaagctcttccgaaagctgtaacaaatgatgtacgtgaccgtctgcctctttcagcaatacgttgcccggaacaaggaagtctttctccgaatacaccgtcttatctgtcggaatacatacggtaaatacagaaccgccaccttcattgtctttatactcaatcgtacctttatgcacctgcaccagttcgtggctcaaatgcagaccgactccaatactgtcaccggagaaattactctgcataaaccgcttgaacaattcattctgtttctctttaggaatccccactcccgtatccgaaacctgaatctgcaatgtttgcttcccttcgtccacattcaccgaaagaataatcgttccgttggaaggagtatatttaaatgcatttgaaagcaggttataagtcaccttatccaaattacctttatcaataaacatcttataagatggcaccgaaggcaagaaacggaagttcatattcttctgttccgccacgtcgccgaaactcaaaaatatttcataaaggaaagagatgacatctgtttcctctaaagaaagcgccagtttattattctgcatctttctgaattccaataactggttgatgagtctcaacatacgttgcgtactcttatccattgttttcagaggatatatcaattcgcgcggaatatccgtgacacgctgaattttctccaaagctccctggattaaagtaagcggcgtacggaattcatgagaaatattggtgaagaagaccagcttatattcagtcagttgcttctctacgttaatacggttacgcaaaccattaaagttgcggacgatgcggaaggcaaaatacaaggctaccatcaataacagaacatagcacaacattgcccagttagtcttccaaaacggtgggacgactacgatcttcagtgtagtctcactgtcgttccatatacccgatccattgctggacttgacatgaagtatgtaggttcccggattcaggtacttaaaggaggcgaaattcagtggagaaggagcactccatccctggtcgtagttttccaaccaatacatatatttcgtatgtccgctatccgaatagtcgaaagtggagaaatctatcaggaatgagttttgaaaatatttcagcgtaatttcatccgaataagcaagagactgttttaaaggagaatcctccatctgcggattcatctgggtcccattgacgtacaaatcagtgaaaacaaccggagaaaacgtttcactatcttgtatcttttcagggtcgatcacaattaatccatagtttgtaccaaaaagcaatttcccgtcttcacgcatacaggcactattctcactatacacatttcctaaagtataggaagaaaagaaatagttctcaaaagaacgggtggacggggtgaacttggaaattccatattcagtcgctacccaaaggtttccttttctatctcccagaacagactggatcacatcgttgaccaacccttcggaagttccgtaatgctcatatttcaatgaatgatagtcgtcctgcggcgtacagaggttcagtcccgaaccggaagtaccaatccacatacgtcccttcgtatcacgatagatacatttgatttcattactgcagaattttccgtttgtataactgaagagatgataattatcaccatccgcaatcagtgagtccggatgaaagatacaaatcccctcactggttcctacccagaccattccgttttcatcttcttctatcacacgcaccatcctcattccgaacgtttgctggaagaaatgccggaatttatatttcccgtcagaagtaggttcagccaattcgagccctccgccgaatgtacccacccacatacggtctttacgatcgcgataaatagcaaaaacgttattatccgacaatgaagttgggtcggacggggtattataataccaggtatctcccaccttcaatccattaccacgggttccagtccacatccgtccctggcgatcttcagcgattgcataaatattggaatgaaaatattgattcgtcattttcgactgaagatttgcgtcaaaggtataaagtccgcctttacgcgtacctacccaaatatcgccattagacatcttggtcaacatacggatggtattcgaacggtcgaacagttcacgggactcgggatagatgcgggaagttccttcattcaacactgaaatgcgggataaacccgaatattccgaagctacccagatgccaccggcacgatcttccatgacatattgcaggaaatccgaactgatatgactttgatcgttgatgttggcaacgaaatgttccagtttatcttcggctgtgttataagcaaaaagcccattcccataggtagaaatccagatgattccgcgggaatcatgtacgatatgataacgttcgaagtcgatgtaactgatcttatcttgagggatcaactggaaatctttactttcaccggttgcggcaaccacataggtgaggtgtcctgtatgattatatatccaatagtctccgtggttgtcgcgaatcagttcgccctttttaatattcagacgggggtcagcggctacttctccggtcgcaaaattatatgtatatactccggtcgtagtcagaatcatccatttatctttcaacaagaaatttccggtaggcgacgtctgccctgcaacggttgaaagggcagccagcttctgcatcttctgcgtagccgaatggtaataataaatatctccatctgccgtaaggaaatacatgtcatccttataagccagagaagaagtgaaatgaatcaaccggtcttctatccgatattgtccgttggagacagaaaccaatccgcattgagtgccgatccagatacgtccgctggcatcttcattcacgaatttcacccggttatccggcaggtttccacgttctgtcctgaatacggtagatgtcatttcaccgtttttctgatgcaccatacgtcggcaaccattgccttgatgtgataaccatacgtctccgttggctgtaacaaatacagtagagtaattctgccttaactcaccgcaacccgtgtaatcaacaaaacgggcacgttgcaaatcatagcagctatatagttcaggtgtagtggaaatccataaaaagccatctttatcttctgtgagatcgtaaatccggttgtcggccaaagacactttatctccagcttccggacgaaaggtcaggaaagagttgccatcataacgacttaatccgttcaaggtagccagccacaaaaagcctttgctatcctgatagatgtatcggatagagttgttgggaagaccatcactagttctcatttgtgtagaacgaagctctattgcactataagcattcagtacaaagctaacaaggaaagtgaaaactaaaaggtgtctttgcgtcataaagattccaagattaataataaatgttggacaaaaataatcaagatagttgagataataaaagaaacactccattaaatagtaggaagcggatatgctaaagagcaattactaccattatttagacgcggattacacgaatgacgcggattttttattcttaaatctgtgtcattcgtgtaatccgcgtctaaataattacagactgatagaattactgaaaactcaatccatgtggaatacttccggcaaaggaatggatacgggtgaattgtccggattcacttccatgatatccgccatataatcccaccatttctgtacgatttccgtattacctaaatcctgcgaacctgctcccccttccgttttttggaaagcaaacaggatatttgtttctttatcccaataaatcgaatagtccgacactccattctgtgaaagcagtgctttcagttcgggccagatggcagcatgtcttttttcatattcggcttcacatccgggtttcaaatacattttaaatgcttctcgtttcatggtttcaatctatttaaagttaatctttcttttcttctgtgtcgatagcaaaaataggtgctgtcgtcttttgtttcacctggtagtattgaacggcactgtcattcatctgtggatattgatttttcaacaagcgaatcatttccgcacctgcccaaagaaccggtccgtaaccatgtgccgcatatacattgaccggacggtaatagtaaaaagcagggtcgaaagccattcccgtaccgacacaggttccttccacttgcccctccgcatttatcttgccggctacggcatgccatcccagatgagtaaccggtccgtaagcaatggcgtcaatccatcctttattgatggcgtgtgccaggcagtatacatatatcgcagtagcggaagtttccaggtaagaatcattccggtcgagcagttggtgccaaagtccctctccgctttgtaaggctgtcactccacgtacatgagcccggaaataatccatcactttcgcacgttgaggatagtcttccggtagaacgtcgagcagttcgcaagccgtcaacatagcccaaccgttggcgcgcgcccaacaaaaagcaggatgatcgctactgctttccacccatccgtgacgatacaatcctttttcggggataaacatgcggtcggcaaattgcaggaattgtctcactgcttctgccagatatttatctttttgctccttgtcataataactcatctgtgctactgccgaaatacccataaacatatcatccagccaaagagtgttatgctgcggacggttgcgtgcaaaagttccatctgccagacgatactctttatttatgatgaaatcaaaataattccgtatcagttcatccacaggaagcgagggatctttcaaacggactttcaccatcgccgcgcatacggctcccgcatcatccagtgcgtgcggagtgaggatttgaagcaactgcgggtccgttgtacccttttctttataaacacgcttgaaatgcggtgctacttcggccagaaaacgaaaacgattctgtacataatccatatagcgtatgtcgcccgtagcttcggatgccgctatcaaggcagagtaggtcactccccattcataacttgccaaacggaaagctccacgctccagttgtgcctcctctcccatcgttgtatagtcggtaatcactttacccgtattcttgtctaccacacgggcgggagtctccttatctatataagcaaatacacggtctacctctttctttacctgttccggtgtcaaatcaccatacgtgccctgataagcaggttgcaataaatgcaaaggggtgtttgagtcattcactacagttttctttttctgtgcgctgacaggcaaagctatcagcaacaaagcaatggctatgatacgaatattcatattttattttttaggtattttacatcctctgaatagggttccctgcaaatccggtccaaagtagaatcccggttgtgtcggctggttgtaagctacgttctgggtagcgatactgatgcgataaacaggatcctccaaaaaggtgtggaagcggtaatcagtgggaatggtagagacataaagccgcaaagcggtattatcggctgtgcgcaacagtacttcttcccgccagtcgcctacaatatccccttgcaggcaaggtgttgccttcgttccgttgttggaaagagctccttcgaaaatggctatacgctcacagactcctttcttccaattatatttgctgactatatttctatccaatagttcgcgcagtaaatcaccgtcccaccagacagccatattacatgacaatcctctgacacgggctttcaccacttctccttttatatttcttattcctccggaagcaagagaccacatttcaacgcccggatgggtcgggtcaatatcagccgccatacaacgcccgacatctgtactatcttttatctggaaaagaatttctccggttgccgcatctctgtacgtacttccgtcacgcttgttttcgtgacagtcccatacttgcaaccctttgcgggaaggatcgaaatgagtcagatgaatcgcgtctccatgtcccatcttcgttgtgtacagccctttgccgttatggtcgatggcacacgaaccgtagataatctcatcgcatccgtcaccgtctacgtcacctacccgaaggttatgattaccttgtccggcatagtcttcacaaccgggatggttactgtcgaaaatccagcgttctttcagttcctttccattccagtcgtatgctgccaatactgtacgggtataatacccacgacacatcacaacactaggatggatgccgtcgagataggcaacgcaagccaaaaagcggtcactacgattaccacgattgtctccccagtccatcaggtttcctctttctggtacgtaatcaattgtttgcatcgcttctcctgtcagtccgttgaagacagtcagatattccggtccggtcaaaatacgtccctgttcattccgatagtcagcttgcgcatctccaatcacttttccttttccgtccactgttccgtcggcggttttcattactacttccgctttaccgtcaccatcgaagtcaaacaccataaactgggtgtagtgtgcaccggcacgtatattacgtcccagattaatgcgccataaatgttgcccgtttaatttataacaatcgaaatatacctctccggtgtaaccgtcatgcgaattatcgtgtgcgttcgacggatcccatttcaagataatctcatattccccgtcaccgtctacatcgccgatactggcatcattaggagcatagaaataactttgtcctgccggagtcgtaccgttttcaggacgattcagcgggatgttcagataacctgccggagcatcggacggcaattgataacagctttccgtttttgattggatagctttgacggtataaagtacggattccgtacctttatatatatcctgaaagaaagtcgcatttcttatcggatatttgtttaccttttcaccgtttctataaacatcaaaagattcgtccatcgggtcggaggacagataacgccaagacacggcaacagtagatggattctctctgatggcaattacaccgcgtcccaaatgttcgcgtttcagtttcgaaaagtcatagttcggctgcgccactacaaaagcagctatcagacacagacttaaaaaagcacttatgcatttcatagttttatcgttaatcaatttacaacacaaaagtaagcggcacagcctacttataaaatagaatattgtacatatctatgtagaaatcatcatatagcccacttttaaaccgcattataactacctggtgaacaaaaatgaatatatctgaacggaaatccattgaaaaagaaaagtgcgtcccttatctttgccaatgaaaattagaatgaacacccaattaataaaacagaattatttcaccatgaagaaatcactactctcattctttacagtaacccttctttgtcttatgacaggaaagccggtcatggcacaagagttacctgcacaaaaagagactttagagactatcgtaaaagtaaacgactactttatgaaaaagtatgccgattacacattgccttctttctatggcagagtccgtccaagcaatatatggacgagaggcgtatattatgaaggattaatggctctgtatggcatttacccgcgtgaggattattataagtatgcctacgattgggctgatttccacaaatggggaatgagaaacggcaatacgacccgtaacgcagacgaccattgctgcggacaaacgtatatcgacctttataatatgtgtccgtccgacccaaatatgatccggaatataaaagcaagtatcgatatggtagtcaacactccccaggtgaacgattggtggtggattgacgctatccaaatggcaatgccaatctacgcaaagtttggaaaaatgaccggtgaacagaaatactatgataagatgtgggatatgtattcttacactcgtaacgtgcacggagaagccggaatgtataatcctaaagattgcttatggtggcgcgatcaggactttgatcctccttacaaagaaccgaatggagaagattgctactggagtcgtggaaatggctgggtatatgcagctcttgtacgggtattggatgaaatccctactaatgaaacacatcgccaggactatataaatgattttctcgctatgagcaaagcacttaaaaaatgtcagcgtgaagatggtttctggaatgtgagtcttcatgatccgacgaacttcggaggtaaagagacttccggaacagcactgtttgtatacggtatggcttggggagtgcgcaacggattactcgaccgcagagaatatcttcccgtccttttaaaagcatggaacgctatggtgaaagatgccgtacatccgaacggattcctgggatatgtgcagggaacaggcaaagagcctaaagacggacagccggttacttataagagtgtgcccgactttgaagactacggagtcggttgtttcctgcttgccggaacagaagtttataaattaaaataacatagacagttttttcattaggtttaaagataatcattcattaggtttagttagaggttagttagtagctagttccctcactgactgtttagacaccggtcagtgagggatttcaaaaaaacagattcatgaaaaacaaattattcccgtatatatgttggctgacggccattacattcagtttgcaactgcaagcgcaaaataaagtttccgctcccatggcagatgtcaatcaagtaattgacaacacgctggacagcctgaataaagcacgtacctcgcgaccggaagccggttcgagccggaaaggtgacaaccctgttctgtttctggtaggtaactctaccatgcgtaccggaactttaggaaacggcaacaacggacaatggggatggggctattatgcaggcgattatttcgactctaaccggattactgtagaaaatcatgcactgggtggaaccagtagccgtactttctataaccgtttatggccggatgtaatcaaaggagtacgcccgggagactgggttatcatcgaactagggcacaatgacaacggcccatacgacagcggacgtgcccgtgcttccattcccggaattggcaaagatacactgaacgtaacgattaaagaaaccggagtaaaagaaaccgtatatacctacggggaatatatgcgtcgtttcattcaagatgtaaaagccaaaggtgctcatccgatccttttttcgcttactccccgcaatgcttgggaagacaaagacagcaccatcatcacacgtgtcaacaagacttttggattgtgggcaaagcaagtagccgaagaacagcatgttccttttattgatttgaatgatatcagtgcccgcaaatttgaaaagttcggcaagaataaggtgaaatatatgttctacatcgaccgtatacatacaagtgctttcggtgctaaagtaaatgctgaatctgctgctgacggaatacgtgcgtatgaaggactggaattagccaattatctgaaacctgttgagaaagatacagtgacaggttccagtcggaaagagggacgtccggtattgtttactatcggagatagtacggtcagaaatgaagataaagacaaaaacggtatgtggggttggggaagcgtaattgctgacgagttcaatctaaataaaatttctgtagaaaatcgtgcgatggcaggacgtagtgcacgtactttcctcgatgaaggtcgttgggataaggtatacaatgccttgcaaccgggggacttcgttctgattcagttcggacataatgatgcaggagatataaacaaagggaaagcccgtgccgaattgcgcggttcgggagatgagagcaaagtctttctaatggaaaagacaggcaaatatcaagttgtttatactttcggctggtatcttcgaaagttcatcatggatgttcaggagaaaggtgccattcccatcgttcttagtcatacgccacgcaacaaatggaaagatggaaaaatagaacgtaataccgagtcttttggcaagtggacacgtgaagctgcggaagctacgggagcttatttcattgacttgaataagattagtgccgataaacttgaaaagaaaggtgtgaagaaagctgcagcttactacaatcacgaccatacacatacttctttgaaaggagcgcacatgaacgccaaaagtattgctgaagggttgaaaaagagtgattgcccgctaaaagagtatttgaaataatacgaaagagaatcctgtaaagatagcaaaggactaaagggaaatatagactatccggactgtttaaatattctatcttaaaaaaggaatatttaagcagtgcagaatggagaaaacagcatagcagatgaagaagaataaaaaagctccgacatttgtcaacacgcaaatcctcattcttatcatttatagagtttatctagcatttcacacctattttatcctacaacacttgcaagtcgatatcgattcagggattaatcttccattatgttattattttcttattcaaaagtccaggtaaatcagagaaaaactagcttaaaaaagcacatttatatcttcctcaccgatgaaggacaagttcatcggtgaggaagatagcgttcatcggtgaggatcaccctgttggtttaaacctaacgaactctttttccgttagaaaagacgcatattctgtctgatattattcacttttcgcctatatttctgcatattattgcacttatttatgcagttttttctctgattcatcaatttcgcaacggttattttctaatataatcttaaaaacagaacatctggacaggatatgttcatccccattcaagggaaaaatgaatgttcgtatccaacataatacagtcgcaaatcattgatttattccacggaatagattaactttgcctgtacaaattaaaagcctgccaatatgagccaagtgaaaggaataccatacggaatatccgacttcaaccggatgcggaacgaaaacttctatttcgtcgataaaaccatgtatctgccccttatcgaggaaatgcccagttaccttttccttattcgtccgagacgtttcggaaaaagcttattcctaagcatgatgcgtacttattacgacataatacagaaggataacttcgacaagtatttcggtgacttatggataggaagccgtccaaccaaacaacataacagtttccaagtccttttcttcgacttctcaaaagcaggctgctcactgccgggagcagatttgatgagtagctttaatgaatattgcagtatcatcatcaaccagtttgcccatgcatacgcatcttattatgatgaagatttcaagtcaacagtagaaagcattgaaagcgctaaagcaaaattatcatatatagaagtaaaggctaaagaaaaaggatatcctctctatctgataattgacgaatatgacaactttaccaacgtcatattgagcgaacacggacagaaaatgttccatgacctgactcatgccagcggcttctaccgtgaatacttcaagcagttcaaaggtatgtttgaccgaattttcctaatgggagtcagccctatcacactggatgatttatctagcgggtataatattgactggaatatatcgactgattcccgttttaatgccatgataggatttgatgaaactgaagtacgtgaaatgctccgttattaccaacaaaatggaaagctggtcggtgatgtagaagcgatgattacagaaatgaaaccgtggtatgacaattattgcttcgccagaacatctttggacaacgaccgtgtgtttaattgcgatatgactttatactatttacgtaaccaaattgattttcaccgtccacccgaaaatatggtagacaagaatatccgtacggattacagtaaactgaaaatgctggcacgcattgaccacgacaacacccatgagggaagccgcatgagtactatcgaagaaattgcggcaaaaggtgaaatactggtagacttacatacttcgttcccgtcagaaaagatagcagatatagagaacttccgaagcctgctctattattatggtttacttaccatgtgcggcacccgtggcgaccgtctgaaaatgtgcatacctaacaattgtgtgcgcgagcagtaccttggattcttgcgcgactactatcaacaggcccataccctgaatctttcacatctgaaagacttgatagatgatttcgccttcgatggtcattggcaaccattcttcgaaaccatcgccggtgcctatcgggagaactcttccatacgagatgcgatagaaggggaaagaaacctgcaaggtttcctaaaagcctatcttgccattgcttcttattatctcgtacagccggaactggaaatgaactatggctattgtgacttcttcctattgccggacaaaatgcgttattccgatatagaacacagctatattctggagttgaaatacgctacacgtacagctaccaatgctgaacttgaagcccaagcagaagaaggaagacagcaactgttgcgatacagtaaggataaagttgtgcagaaactggctactggaacgacacttcacctattattaattcagttccaaggttgggatatggtgaaatgtgaagaaataaatgcttctgctattcatccttcggaataacttcctgcatataaatagcatccaagctccaaagagcagcatcattcgtgctaatgctcgtacattcatctaatggagacggtacttccggcggaagtatggtagtgatgcggaaaggcggtgcaggtgtatgttccaaccgggtaaacaaatctttccaggcttcttcagccatttgggtattgcgcaagtgataagctgcgtaagccatcagatgggagacacgaaaacggctatggctaagttcccatgctttcttcttgtaacgtgcagcatgatcaagccaggcgtctttccattcgggtatatcaatcatacgcatcatttcattggctatctcaaatccgcccatgatcgtcattaaatggttggttgtttccaatttggggtcacattcggttgtgatgattcctgttgacggatcaaatcctagagctttggggccggtaaagaggcggttaggcaggacggcaatgcttttcattcctgctattattttatcacgataagcagtgttacctgtgcgctcccattctgtcatccaattaccggcataagccagccagtcgggaccgatacgcaaacgggcgggagcggtacaaggatattcactgcgaggttgggccaggcgcatagggtccaagtcatagagtttgtggtcggcatccttcacttcagtcattaaatcaccgcaacgttcgtctgtagtaaggtaatagtagaaacggttccaggcggcctggctgattcgcgcttctttagctccgcatccccaatgacttacattatgccgactgcctaatccggcattgggaccgatatgatagacatccacttcgcctgtatgacgcgtcatagcttctgccatacgccaaatatcaatacgcccggtacgcaggaaattataccatagccacatattagaagccagttccgtattgtcccaggcaaatcctccgacatcgtaacgccaggtatgacgaacagggtcataagcgtgcatcacatcaccataattccagaaaccgtaccacttgttttgttcgattgctttctgatagaagtcaatgtaagcatccaagcggtcttctacacgagtacggaatggagtagtacggtcggggagactccatatcccgaaagcctggcgggcatgaagataattcggggttggcattaacagactagggctagaaaattgtttggcataatcagcaaaagccttttttccggcatagccactttgtgggatcagtgtcaacgtagttgtacgggcaatgccgtatggcgtgctcataccttcttggacatcttcatagctggcattcaggtcatgagctatacgatcataatgccgtaaatccataggctcggactccggactccacaaccaggcggtaagggtagctaccggggttcgtgcgtctgaaatttcaatagaagagggataagactgccaaaagtcatgcatacaaagtcctaatcctccggtaatatctccgacaaaaatatatccatcgctacgtgtgccggaaaaggttcctatccagggattatcgttattggcacgtttacgaatggagaaagcatcggcagtgagttgagacagacggtagtcattccatgaagcccagttatcgagcagagagcggttcttttcatcgaaagattcataaggcggaatacgtttgccttccatttgctgctgttgcagggaggggtcatcagtcggcatctgttgtgcatctttcttttcattactgtttttcttattatctgtcttatttaaagtgagtatgcgacgccctaccaatggttgtaccggctcgctccacactcctccatctgcacacgaaaaagcaatatgacgattatacagagcttcacgcataggaacatcgaaacggatacccaaactacgaatgaaatctttcttctgatctccgtcatagatgaagctatgtaccattttgatctgttcactaccaccataaaagtagagacgtaccacaaaaggaagccactcacggttattccgtttgttcatatcagagttattcgcatagttcccttccccttcagagtgattcgtatcaatcttcttattcctgttccgatgtatcccttccaactttacaagtgcccgtacagagcccagacgttctatggttactgattttatttctcctatgtaatgagtaaaagatatttgagatgtattttcttgaatcggctcgttttgcgtattacaaatcagacgcgctttctctcctactttagttcccttatataataggctatcaatcaggaaatctccgcgtcggggaataaatacggaaattagccctgtttcaatttgaatatcttcaggcgtttcagtgattgcaatagaagcattaggctgtttattgatagtttttgctttccggggggctttttctaatgtcagtctttctgttccggcaggaatgactccggcaactccgctccatttcacggaaccatccggccagtaagccaatggccaagtatctaccggaatctcttgatttctatctgtttttaaccgcaatgaagtttctggaaataggtagccttcatcaaaaggaactccgaagcttacagctttgtcttgttcaggagtattgccgatccaatgtaaaggaacagtagacgtttggggtggcaaacattcatagcggaagtttgtaatgcgggtacgggataaggtggtacgaaagccgaaccatccttctgtcagaggttcggcatcgcggaagtccaccagtcgcttgccgtctatgtaataactaaccctattattttcatttgttatcttaatgtgataccagtgattcgcttttagcaaatgttcggtatctgtatattctttcaatatggcaggacgtactttgggatctgtgattcctgcttcattgccgtcataacgacggaagcgtgtagtagagttataatttccaccatatcccatgtaatagagttgcaaagaataacaattcagaaagattccgctacgccacttctcacgtttccatatattatcaggatgtttggggtccgaagccatccaaaagcaattcaggtcactcaaacggtctccttctttttctacaactacacatgcatcatattcaatggttacccgtccgctcatcttttctttcctccataaggtaaggcctttaggagacagtatttcagcggtatcaccctgaaatgtcactttataatccggagattccgactctaccttccaatatttatgaaactggcgggcgttgaggccggaaactttattgttttgtgcgtttgttcctaaagtgatgaagaggaacaaaaggataaagagttttttcatatgtatatttgctatctcaccttacaaaggtagggagagccgatcaattaagaaatagaatattatccatatatatggcgattcgttcaactatgaaaaaaagaacaacccgacagttagccggattgttctttttcaacaaactcatatcaaataagagatttcttattcaaaaacctttttattctgcttttttcaaagtttcagcacctacatagtaacctaagttagttccctggttatatcccatattctgcatcgcttgagacatatcataattatgatcggtcatcaagtgaggaagacggaattcggtaggatgattcgtggagaatatataaatagatttcatgtcacttgaacccattattacttcttcacgatagtcaccgagaaaatcaccatagtaacaaggattgtatttggtgctatggttaccgtcattgctaccgtaagttccaaaatataccaaacgagtcttattcgtcttgtttacatcagggttctctttatagctcacgacacaagcacggtccagcatttctcttgtcggctgcccgctccaataaatggctacattatacaaaactccaccaccaatacctgtaggatatgtactggataccaatccactgccactacaactgaataccccttcctgcaaagaagaccagtactcaaaattcgggctatccggatcgatatctgccacaatacaacgaccgacatcagtagtcgaacccgctccatggccggtaatcaagccaccatctcttgcatcaatcacttgacatccataaccgtgtccttgtccattataattgcccggttcttcaaatgaagcaacaatttgcaatcctgaacggtcttttataaatttgccaacacataaacagtcaccatgaccgtttccggtacaccacaattcgcttccatcatcatctatagccgcagaaccatacaagatttcatcttttccatcatcgtccaagtccgctacacgaaaactatgcgaacacatggacaaccattttgaagaatgttcggctgtatcaaacttccaacgggtttccagtttattccctttcaaatcgagtgcccatacttgccaattatgataaatacctctactgatgatcagactggggttgcttgttctcactccggtcgcttcgtcaggtataccatccagataagccaccccgataaagaaacggtccatgcggtttccgtaatcatctccccaatattcactccaatatttagcacgcgacgcttttgaaccacttccaccacgaggaatattatccacccgggtaatttcacgtccatcatatccacggcaaatagagatatattcgggaccttccattatcaaaccgcaaattgtattaatacttgctcccgaataccagcccacagcgtcagtctgacgaattcgataatcgttcacattaccataagcatcggtaatgaccttaccatccccaaactttgtaccttctgaagagcggaaagctatttcacataaaccatctccatcaaaatcgtataaaatatatgaagtataatgtgaaccggaacgaatattgattcccaaatcaatttgccacaaaaaagtaccatccatcttataagcttccaacaaggtcgaaccattattccatcccccctggttggcaccatcatacggttctctcttcaccacaatctccaattcaccgtcaccgtccaagtcacctagctgaatatcatcaggagaatatgtaatcgacgcatcgggtacattcatgtttaatctaatctcatgataaaacttttctgccatttcagaggtaaaggtataatcgcaaagcgtttcagcctgattggcaagagtgacccggtatacattcgtttttgatacatcaatatccgcatccacccaagaagtagtattcgaaataggtttctcattcaatttcacttccgtctcgccgtctaccgacttataaatatcaaaagcaacattagacggatcggtcttcagtaatctccagctaatcaatgcggatgatatgccggaagagttattggcgtcaacatttggtgccgggtcgtaactaacccacattgcacggctacccgttataacttcagtaggcagaggcggcaactcctcttccgtctgattgccattgttcacttcaacgacggggtcattatccgagcaggcaactatggccagcagacaaaacagccccagtattatataatgtttcttcatttctttcgtttttttattctataaacatccgttctatgcaagaatatcctatcactattcatcagcattccggttgtgggttaccaccccggattctgctccaaattaggattcttagatttttcactctgcggaatcgggaagaaatacatcttatcatcccaacttctttcttttaccttacgttcatacgtataagtatcatccccattcttcgtaatcttcatttcaacaatgttcttgaaatgtttgtcaccctccttccaacgacgtacatcccaaaaacgatgtccttcaaaggccaattctaccatacgttcattctgatatttcttccagaaagcatcattggtcatcccttgagggaatccgggcatctcggcacgcgtacgaactactttgatagcatccacagccgaagttgtaaattcattatccgttgcatacggactacccagatacttatatacagcttccgcataattcaaatagaactctccaaaacggaatgtaatccatgaatgataggtctttgaagctgtaccggcacgtaagtctactgccgtctgacaatacttcttcagataatagccagtcggagttccgccactcaaaggctccgcatttagtccgccctgataggtttgcagaggaacagtattccagttaggccacttttcgtccccattcttggcaatagtcagatagaaacgagggtcgcggttggtataataaggattagcaggatcatagttatccaactcgtccggacgcaaccctgtatccttcatctcatacgcatccaccagtgtctgtgtgggacagtttccacctttacaattttccaaccctaccgggaagttatatccctcaaaagaattagtggtagtagtggcacgacggagaaaaatcaattcattagtagcgtcattgtaattgtccttgctccaaagtgatgaataatcctccactaagagttttgccttttcagcaaacccattactgtcatctaaaatttccttattggctttagctgcacgataccacagttctctattatcagtcggattaaataaaggacttgccgcatacaatgctgcacgagctttcaaggccaataccgttttacggttggcacgtcctgtttccgccggactactaggcaatgccatatctcccagtttactgtaatcgacgataatcttatctttaatatcatcacattcggctatgatataatcaaaaatctcctgtgccggtctgcgcgataacgtattcgattcttcggctgttaatatatggtcgctaaacggcacatctccatattgccgtaccaagttaaagtagaaatatgcacgaaggaaacgtacctcatactggtaattggtatagcggaacatctgttgtgcataatcactgttcaaagccaactcgggaaatgtcagtccggtaaacttctccagatataaattacaattggctatcccttcataacaggacgtccacatgctacttttagcattcgacggactccaagaaccattgtaaaagtcttcaatctgatttcccgaataagcatattcggactcatcggtagcagaaccaagaattgccccgctatagtttccaaagtccacatccatggacaaatagatatttgttatcagccctcctacattaccgaagttgagcttcacaaaatcctcatcataattattgtactcatgatattccatcttatctgagcaggaaccgagtgcggctacacacatcattccgtagataatgtttttcagtttcattctttcgctttgtttttatgattaaaaaccaatcgtaacaccgactactacactcttattcagcggagtcgctacaccataacattccggatctgtcacatcaatatgatctgaacagaacaagtctgttcctctgacatataacttggcactccccaatatcttagtcttcttcatccattcttccggaaatctgtaatacacctccgcgttacgtaacttcaagaatgaccggtccgccaaccaaactgtattagcctgatagttattggcattactctgtgaactcaaacgaggatatttggcattttgattttccggtgtccaacgattctcataataatgagtagaaagtgtcgtattatttatcaacggccaaaacatactcttcgtattcaagacagcagaatagttacctgttccctgaaacattacatctactccaatccctttccattcggctcccaaatggaaagaataataaatttctggagccgtcgtactataaccgatagctgttttatcattggcatcaatgattccgtctccattcacatctttatattttatgtctcccggcactaccgtactaaagttttgcggaaggctgtttgctatatcttctttatctttgaagaaaccttcagctaccattccatatacttgtcccaaccgatttcctgtttgcacaagattcttatacaaacgcggttcttccagttgttccttaatttcattcttattccaagcaaaattaccgccaaggttgaacactacatctcctaaccgtttcgtatagttaagtcctagttccacgccatagctatcaacgattccggcattctcgaacggagcatctacgcccaacacatcggtatattttccttcggaagagacccaaatatcttttctccgttggtaatagccttctgccgtcacgtccagtccattgaacaacacggcatcaacaccaacattgtatttatacgctttctcatgtgtcgaattagcagttgccaggcgcccgataatagtacttccgaattcagagtcgtaactactgttaaacttatattgcgtaccggtagtcgtataaatctgatcccaatagtcatatacggtagtacttccgtctttaggcagataatcaacattgatcactccaaacgaagcgcgcaatttcaagaagttcacccaagacacatctttcaaccatttttcttccgaaagtacccaagcagcagaaatggtaggagagaaagcccatttatgtcccggtgccaataagctggaggccgagccaaccaatgccagatccaaataatagcgattagagaagcctacatgattataccaggaaacattttgccgataaatagtggtattcagaccgtatgaatcacgatattcataatcccatttcaattgagaatacacatcccacttttggaacgagcgattataatctacactacctgcaaagttaaattggcgcgcccagttgtcaatacctgcacccgaacccatttcactggattcgccacctgaaatggcagtataaaacggaccgttagttgtccagcttgttgcataaccggcatacgtataagtcttgctatgatcttccagaatattggaatagttgtcataagctaaacgaaagttagctcccaatcctttcagcaaaccagacaaatcttgtgacaaggtaaggtcggcaaacaaactacgagagtgtcctttagaataagcagctccctgcgattgtgcgacaggattcgacgtccccgcccaagtagtacttcctccccaactgccatcttccgtacgaaccggaaaagctgcagaaggaatcgaataaatcatatcccataggttaaccgaagcccccggaatccgagattcggacaaggtaccgagaagattcaacttcaatttggtagtggcggttaaatcaatatccagatttgtacgcaaattagcacgtgaatacatattttgtgtagaatatccgtcatttgcattcggggttttgataaaccctttgtctgttaataaattcgccatagtatagtagcggaactttgctcctcctccacggaattcgatcgtatatttattagacactcctctgtctttaaaggtttcatcaatccagttcacattaggatagagataagggtacatacgggaagcccctccactgcctactccattacggaaagcatcgacttcttccggagtataccgagctcccaaaccttcatatccacgcgcttcattcactgcagaagcatacgtagccgcatccacaaattccggacgtcgagactgtgtgttaatgatatgatcatacgtaaaggttatctcttttgttttgtacttaccacgcttcgtcgtaatcaagatcgcaccgttcactcctttgtatccgtacaatgccacagccgcggcatctttcaggatggaaacggattctacttcttccggactcaccaagctcatgtctcgttccaaaccgtcaaccagcacaagcggtgtactacttgacaagctctgcaaaccacgtacataaaaggtaggatctgccattaacccggtactgaccgcattctgcaaagtagtaaggcccaatccatatccatataaagaattggatatattccgggaagaccgcttattaaactcttcattataggtggtagaaactgctgccgttgattcatgacgattgaatgtccggttagctcccacatcaatagtctgagctgcatatcccatcacaatggtcatcggaccatcagtctttgccacaactgtggtagagcctttgtcgacagaaacgacactcaagcgttgtcctttctcgaccgcaatctcgaatttaccatctttatcagtttcaacccgggtctccactgcgccaccttccacattaacggacgctccatagactgggtttcccgatttatcaacaacaatacctataatgttgttgtctgtattctgcgctctgaccggaatgctcaaacaaaccagtaaagccagtatcagaatcttattttttctcatataaatcaatattcaatattgttttaatctatttcgctgtctcacattaccaacccggattctgaatcaatccatatcctttgttaatttccgtttgcgggaatggagaaagataccatttgggatcaaatccgtatgtccaccaacgacggaccggtttggataactcaaacctttcatattcaaaacgagtaggctgcaatgctcccttgttcttatctccttcattccatttagcatttcccgttatacgattaccggtatcatccaaacgataggtgagcaacccgtgcaggcgcttctcgaaacgatcggcacgtttgtaacggataagatcaaagtaacggctatcttcaagccccaattcccgaacacgctcgcacagcaattcttccaataaggctgctttgtcagaaagtaaattcttatctgtaacacactccgccaaatctttcttcaatcctacacgggcacgtactatattcatttggttaatagcgccccggtgatcattcttggcttgaagcaaggcctctgcataagttaaataaatgtcagataaacgaagatatacccaatgcgtatactgacgttggtactctgttcccaaataatatttcatatttttataaccagtcgcatagttacctgattcaagcgctgcattttgtccttcatcgtatcctccgacccacagttcataaggtaaaccggacattgttcctgcactccagtctaacatcttcggcaatccgtttaccatgcaatgctcatacagacgaggatcacgggttaatacgatttccgacaatagttgttctccatttttgaatgttccggtcaggaacattgcatccaacttaccttctgtttccgcctttttccagtcaaacggagtaccgtcggcccatgggaacatctccacatattcctgtgtaggcggatattcggtacgacaaagtgacggaacagcccaggaatgccacatataagaacttgagttgaaagcgtccgacatattcgtgcggacagaatgcaagacctccttgctgttctgacgaatatatcccatacgatatgcctgccgatactgttccggtgtttcttccgaagccttattcaggctatacccgccttgactctccagctctttaaagaatgcttcacaagccttcaaacagttatcccaaagttccgcatggtagccgccgtaccataccagatgctgctgttcagcctctgagtttcctcctgcatatccgttgacatcgttaaacaacggagaagcggcaaattgccagattttgcatttcaatgccatcgcaccggcctttgtccagtgtccggccttgctggcaagatcggcatcagcataagcccacaccaatccaccggaattgatagcatcatccaacatctttatcatgtagttaacagtctcctctaccgtagcacgggggatttcataacctgactccgtaccggtgaatgaagcatataacaatggaagacctccataatgacggaacatatcaaaatagcgtgccgcaatcaggcatttagcttctgccaccaactgagttttttcagtgctatccatgcccggcactctatctatattttccattaacaaccagcaccagcgcactacttcccataccatttcccgtgtatatgggaaaatattaccacgcgtgccatagttggcattgagagaacccaaataatactgctgatatacagttgcgtcactaaaataaagtgaccagcagtctgttagcgcatccttctttcctaaataaggactggaagaatcaggaatattaccgttactgtccgtattatagggtaatccgtaatactgtctactgtaacaggtgttcaaaaattggcgcgtatattccgcactattgaacactgtgtcaatagtagcatttccgcccggtgccttatccaaaaaagagtttccgaatttaatttcgtccacacatgaagtggaaaccaaacaaactgccgctcccaacatcgcaccgatgaaccatttattttgtaatttcattgtatctttcctttatctattttagaatcctaatttcaagctcaacgtataagtcttggacaatggataagaaggtgcattagtagctcttgcctccggatcaccccacaaataaggtgtaatagtccacaaattatatcctgcaaaagccaactggcatgtattcagtccaagtttcttcatcaatgggaagtgaaaattgtatgccacctgaagagttttcaaacgcaggtattttgcatctttctcatataaggtggaggtagcatagttattcttcgcattgtcaatggtagctctcggatactccgaagattgtgacggattttccggtgtccatgtatggtccaaatggtatgccaacaatcctccctgctcgctattggaagatgaatagaacggctgacgaaatacatccgaaatcatacggcttacgttccaggcccctgtccattgagtacttatttccagattcttccaactgaatcctaaattaatacctagcatatattcaggatcatccgtaaagccatagtcataacttgcgtcgttcgcatcaatcttacggtcaccattcaagtcaacatataccgcatctccattttgaagaatgctctcgtgagtggggaacggacgattaaatgtctgctcatataacgcaggtgtatcctcatcatagaagcgccagaaaacgtattgactacgcgaaccgatacggtgtcccttctgatattgatataaattattctgcggggcttccttcttttcaagaatctcattctgattataagaaaggttaatacccgcccaataacggaaattatcgccaatcttatcgttccattttaaagaaagttcccagccccaactgtctacacttcctaaatttgaatagggagtaatgaaccctaacattcccggagctgtaccgtcacgcaaaaggatgtcattacgacgttctttataatattcaaaggttgttttcagacggtcatcaaggaagttaatatcaacaccatagttccgtttcagagctttttcccatgtcacagcagggttattcttagctacctcacgcgcacccagactaacagtaccattatctgttccgaatccatatccccaggcgttagttgctcctccacttgccgttacacgatttgccaagtcacctaaaccgacattatatggatcagccatatacataaaccgcgatcctccaatattatcgttacctaccaaaccgacactggcacgtaatttcaagaagctaaccaccgacttcaaaggacggaaaaacttctcttcactcatcacccaacctatagaaccagccgggaaataagaaaagcgcaaatcggacgcaaagttttccgaaccgttataacccacattaaactctgccatatagcggctcttccaatcataagtgacacgtccgactaatccgacatatccatgaggaatgtccgaatataatttcggataatactctttctgttgattatacaaaactaaggctgtcaccgtatgatcaccaaaagtacgattataattaaagctggcttccatataccaattacgtgctttgcctgtagtatacgaatacttcacatctgtattctctccaaacttacgataagcaatactaccgtcatccatcaatacaggagtgtatgtagcaatagacccaccagaaccgactttattaactgtaaacgagctgttataagatcccttcactttaaaggaaagtcctttagtcaagaagtccattttttgatccagaatcacatccacattcagcgaattgttgctggtctggctgaacccatttccataatatcccatacctgtacctcctgtaaatggtaatttcagtccgtctgaataagtctcatcgctcgaatttaccaattttccatctatgattcccggactggagaaaggagtagcataatacatatttttaatcaatccggaagatccctgactcgtacgcggttgatctgaattattcacattaccactaatattgaatgacaaagtagtcgttttagtgacatccatatccaagtttgtacgatagttaaaccgacggtactgatagcttaaattataaggaagatcaaactcactaaaaagtcctccttgcgtataagcacctgcagagatgaaataacgtactttatctgttcctcccgagatgttcagattatgctggctctgaagcgtagagcttttcataatatagtcagcccattgtatatttgggaaacgaataggatcggaaccatctgcaaatttttgaatcacgccatcactaaataaggcagatttgccatcaccggacatcatttgattatgaaaacgggcatagtcataggaacttgcctgttctaccatttttgtaggcatcaatacagaagcagaagtagtaaacgaaattttcgcctttccttcctttcctcgtttagttgtaatcaaaatgaccccatttgctccacgaataccaaatacggctgttgccgaagcatctttcaagatagaaatggattcaatttcattcgggtcgatatcactcatactttcacgatccacaccgtctacctgaattaacggtgaagaattttcccaagtagctttaccacgaataaaaatttcagcggcatccgctcccggctcaccggaatattgtacggtagtcaaacctgtcatctgccctcctaatacattggaaaccgaacctacagatacacgggtcaattcttctcccttcacactagcgatagctcctgtcatggtcactttcttctgcgtaccataagctacgatttccacctcttcaagtgctgtcacatcctctaccagaatgactttcatgtcatttttcgctactacttttttatcggtataacctataaaagatactttcaatttcgcaccgggacgtacatttattctaaatacaccgtcaatatcggtaattgtaccattagatgttccttccgcaagtacacttgctccaattatcggttcgccttggctatctactactgttccttttatagtactttgctgctgtacaacttcgatggctgccgaagctgtttgcaatccccatgcaggtgcaaaagttgctatagtgaaaaacagagcgacaggtaaggttgtcccctttataaagtttttcttattcatatatgtatatgttcatgatataagtataattttaacggactttatataccgtcattattttagaatgcaagcatcatacggaaataaccggcacgcgaatcacgttcacaaattatgtgatatcttccaccagccataccgtgtgtccattggttggctggagaacgctgtgtgctactccaatagtgtccactgttagttcctgactcgacagaggtcatctcatcaccatttacattcttgagacaacggttaataacactcaaattcttagcgactgtatcccaacacattatagagggcaaataccaaggagtcacatttgccggaatagcttccgcttcacgataagccttgatatacgcataagcatggtcgcaagtagaaggactacccataccttcgtaacacatagtaagtaactgtgtattattgtatcccattagtgctgggaaaaccaatgaagcatcattcttgttaacatccttctctgtgttacaacctacaaacttgtttgcccaattctcatctgaagtaaaccagtctgaataataaccggacttacttgaatggaacattttcaaagcaacatcattttgttcactatcttttaccacagaattcttaatagatagcactataccgtgcgtacatgcagggaaatcgcgacgcaaagcatcaacttctgctgaatagagttcagtatgtgttacactgggttgtgaatttcctacataacatacaataccaatcacattctccggcaccgtttccgcatctactgaaactatttttccatctgcacaaaaatagtctcctacctgcaaagtatggttgattttacttttatcttcgatggtatacattttcgccgttcctccttccagcgtacctttagcttcatattccatctcacttactccagaataagtacccttaattgagaattccttcttcggattaaccaagaaacggtatgtatccgtactttcctgataataaggagttgcttgagtattgttcactgtaaacgaaccggctgttaatggtaacaaataatcatctataccgccatttgtaaagctataggtcaaattaggcatcttcactaccgcaagagccatccgatgttgcatagtaaaagcgatctgtcctttcaaacgatccccctgaacactacccgtactcgtcatcaaatcatattgtgtataatttccttcattttgttcactgcctattttccaattgttgacgtatgtttcaaaaggatccaccttcgtcggatcaaaagtcacattcgcattatacggatagtatgcataaaaagtcatccgctgaaattgtgaacctttgtattcaataggatcccctccatcagtcaattcccaatagccatctgtcagtgtgaatttccgattcttgatatcctctaccaccgtttctcctcttaccgcaaatataccgatagcatctccgttagaaaatcgggtagtatatccattctctgtagcacgtgtcttaccactttcgtccataaatccttcatcagacacactaatctgaaatccctgcaaagaatccggtgtttctccggtgagttcttcattttgcgagcaagacgcaactatggctgcgccagccagaaaaagcattgatatataattatatattttcataaatctcatgtttatatttttagcatttttatctatattagattggtaaacagatcacttcacaacaggctgtggagttacggtttcttctgtaatattccaactaggattagttatctctgttccagtttcagctatactcgggtcggatgttataggatcgtggttttcatcctcccatcctattatttgcgtttgttctgtaattgtcaacacataattattgtcctcgtatttatttgtcttgatgatgtaattataagaaaatcctgatttcaattctgtcaagttagcaaactcggcttcataaagataaccgttcattctagcttggatagttactttgccttgcaccttctgtggcagtaaaatagcttgtactgtataattatcctgctctcctattttatcccaataaatatcatctttatccgtaacagggtcttcactgactgttgtctcccctgttttaggattaaatgtaccattattcttaagcccaataagataacaagttatatctgccaagtccacaccttcgccagcttgaaactccaatctaatacgactcatcacatgattgaatgctaatgtcacgttcggggtttgtgatgtagccttccctttagcaaaaagaaaatctatcttcgcacgttcttctgctgtagcttgattgtcactggctgtagtcacttccaatacaggttgttcttcacctgatgtaccagaaaatggagcgtatgccactacatcatactctccggaacctaatacccaaatctcttctgcatttcctccttttgccgcaaaaagaccattgcccttgtatttgtaatgaatattcacttgttccgtaccacaagtgattcctaccgagtcttctgcctcccagtttgtttccgtagctcttgtaacaagattgctagcctcatgattgtttattactgcactaaaagaaactttcgctcccgtatcaccggtaaactgaatatcagtttctttaatatcgttgctacatcctgctaaaagtagtaaggcaacagcagttgtgacatagttttttttcataccatgttttttaaagttaaacatatttttgttgattagtaaaatcgtcgtaaagtaaaaaagacaatggctgcattcttttccaaccagcaattgaaataaatgaagcattttttttgttgttttccatatctattagatacatctgtta

SEQ ID NO: 86 - DNA, 37967 bp, Bacteroides ovatus
  source 1..37967: mol_type = genomic DNA
gaaataagtaatgataaaaaataaactgcccgtaagatacacgggacagcattttactatagataaagtgctgatagatgatgcaattaaaattgcgaaaataaatgaatccgacactgttatagatattggtgccggaaaaggatttttgactgttcatttagttcgtcaatgcacaaatctaattgcaatagagaatgataaatcgctattgtccattctaaaaaacaagttttctaacaacacgaatgtcaaaattattgattgtgattttagatgttacaccataccaaaaagaaattttaaagttgtgtctaatatccctttcagaataacttctgaaattttaaaatccttgatgtttgatagtgttgagcattttatgggtggttcattgataatgcaacttgaacctgtccaaaagttattttcaaaaaaagttttcaatccatatattgtgttttatcatactttttttgatttaaaacttatgtatgaaatatctcatgagagttttttgccaccaccaaaagtcaagtcagcacttttaaagattgaaagaaaaaaaatgtcaataagttatgaattgaaaagaaaatatctgaattttctcactttcttgttgcaaaaacccgatttgccagccagaactgtattaaagacaatattcagaaaaagtcaagtcagagttattgctgataaatatggaataaatcttaattgtcaaattgttagtttggctgcaaaacaatgggaatgttgttttttggaaatgttggagagagttcctgaaaaaaaccatccctcttaattgttagttgattagagtctgattcagtaaaacaaaattattttttttactgaatcaagattaactgtttaatacaccattttagtcattaagtaacttctattttacttccatgtaatatccacaggattgcgtctcggaatagaagttattttataacttgaatatccaaatagcattggacaagccgctttacgttcttctggtattgataacaaatcctttaatggtttataattgtctatagccaactttacgaatccagcccaacatgtaccgataccaaaagcgggcgcagcaatatcaaaatgagtcaaagcaataattgcttcggtagggtcatcaattggctcaataggaacatgtgcaaaaagtaaatggggagcattatggcaaatcaaatccaaaccactatcccaagttgaaattattgcaggtacataatctgctagaggatgtgatgtgttttgaatagttcgcatccaatcaacggttaaacttgcaacacgatttacctctgatggtttatgaataacaatccattttactggttgtccattccctccagatggagcataacgggctatatcaataactttagcaattaactctttattaactgtctttgaagaataatgtctcacagaacgtcgactttttatatacaatgctatattctgtggttcaatctgactatccaaaaaagacgtattaattttttcgtcaagaaggaaatctaaggtaagagccttctgtgcacaaaaagactcacaatgaccacattttaaacaataatccaatttttcttcaggtatggttggataatttaaggctgtcgatttatcaatgattcccattacacatacagttgcgcaagtattgcatttagaacatgtttttctgtctataagaatttgtggcatttttgtctcctttaaattttattcattaagtgataaacactatatttaataaccccttttagccaacaaattgttatctttgcgtagggtaaacaaaaaataagcttatgaaaactgctatggaaaaaaaagaaaccggcttaatgagacagatcggttatctctcttttgtcgttgttttgttgtatgggcttacgctatttgcggtttcttgtgacaatgatgaagatcctcctcttcctcccgcagtggaaaaagtagtgctggcatttggtgtggatcagggtgaaggtcagctttcggctaaaccgaagttggaaaatacggctgcggaaaagataggagaattgatctctccggctgaaatagcgaaaggcacaacggtgcattttcgtgctacccattccaaatcatggacaatcatgtattggaaagtcaatggcgtcattattcgttctgtggagccggagcagactttcgtcatcgatgagcataaggaggttcgggttgctttcaagccttacaagtcaccggaaccggaggggctgtaaaacaaactgtgtcagcaaagcaataaaatattaattttgctgacacagtttaattgaattctcttttttgctgttcatttgctttatttcaggacttcgcccttctcgttgaagaacacttcgctgtccgtgccttctgcatcggtaaatgtcaccttgtaggtctttgtgccttcctcgctttcctcaactgcggcttccttgattgtcaggtctgcgaaatccttcttgatcgtgtcctgaaccgcctgcggcagatcctttacctcgattggcttataatcgttcaccattaccacaatctcaacatccgataccatgttgccggcgaatgccactgaactacccaatcccataacaagtgctactgcaaataatacctttttcataatccaatctatttaaatatttaacatatggtttctgaaagacaaagaacaaacattgtgccaaacaaacaaacaagtcatatatacctgataatcaaaagcatacaaaaaacacatatatttattgaagaactgttatctgtgtatcatttccacattttgtggaaacgatacacagactttctataattgcctccggcggggttttctctgggggcttctgacctttgcacatataaaaagcaaaatgatagtgatatctgtctaaaaaatcaaaaatcaatcttccggattgtacaaaatgatattgccacagttgagcataaggacagatccagctataaaatggagtaggagagtagcaaaatgatatttatgttttaggcgttcccttcggtcaggctttccgcttctacatggtaaacgcttcaatccttaacgcataatgcccacccacccgaataaggtaggctattttccgattgatcggttcggtgagccatccggtaaaccgaatgactttcaccgatccgaacagtcggaaaaggagtacccggaataaacctttccggctgataggtgcaagcacttaccagctggaaagatatattcctgcatgggtactctggtagccggttgtttgatcccgttattatactttcggaaaaaatctgtgtttagatacttttttctgtgtttaatcctagttctttgctatcgctttgggctagtttgatgttgcttaatccgggagcatcagagggcagaccgaagatcttctggactgctatcatcgttggagccggtgcggatcctttcaggttgtttatcgcttccggagaagggatatatccttcatcctttaggaaagagatctgtgcaaagtcatttttttttatggcaagaaaaaagtctttttcttttagatattgatctaccatttcttttaaatcatcttttactaatgaccagtagttacccttgaagcaatctattccttcaggtgattcttttacagaatctattttttgaaacccatttaatataccttcctctgtaacactccattcgttcctttttattccccagtcgatcatatctttgaatgaatatttttcatttagttcgtggatatcccaaaagtctttttgtcttggttcttcttctgtaatggcagatagtttcatggctgctatttcccgtatgtctgctattcgtatgtggtcgatttcttgtatggggaaaataaatttttcagtatagaaaaaatcgactttaattttgtctataggggagtcccccatgtatagtgtatatcctaaagctgatgtgtccagagaatctgtattctcggaatatggaaaactcctttgaataaactctttcatttcttttgtattcatggttccataatctatatcagtgaataaatctatgtcaatagatcttcgatgtcctagttgtaggctcaaacaggttccacctataagcgtgaaatctttaaaaataggactattgaccagcttttgcagagtttcttttaataaaggagaaacagtttcataatgtaagttcatagaatgtatttttgatagttatcgtttcttgtgttactattccatttgttttttatgttgggaatgacttgttttatggtttctattccatagaaccgaataatctccttgatctcgatatcgttgccatattcaaaagcccgttgtataacccattccttgttccttatccaatttatcttatctattcgtgtgtcccaaaataatcctttacttagtttagataagtcaggatgtttctttcgctcttctttcattatgaaggtatatatgtcatggttggcttgtattttaaagaaaaagccttcaatgtttatgtttaacgctttttctattgaaatggaggcttttatagtgaattttcgttccccttttatatagtcacaaatacgttgcggatattcatttgacatatgcgctaactttttttgagatatattcctttttttaaggattacatccaatatcttacctgccggaacatcttccattgacaagtatttttcatattttatattcataggactataattttgttttggcaaaaataatgactcttaatacaataaccaaatttggttattgttattttggaaaaattataatgcctgctcaatatttttcccgattgtttgcctatcattttgggctagctttatgtcgcttagtccgggagtatcagagagcagaccgaagatcttctggactgctatcatcgttggagccggtgcggatcctttcagttcgtctattattttaggggaagggatatacccttcatccttcagcccggcgatccgggtaaaatcgtttttttttatggcatcttggaactcacattccttgccttttgatatggatgcttgtagatcatcgttccaatcactgtttaccgataactccacgttaggcagttgaagaactttatccttcagttcttcaactggcagaccttcaatattgggtaactcttgaccttttaagaatgtatctagcttcagcgcatatttatagccgttgctatcattgtcaaatatataagtaacctgatcggttatattattaatattttgctttgacaggagcagctttataacgcccatttgtccctgtgtgatgttcccttcagtgctgatatataagatgttcttttcggtattcagaagcttcatttgataatgggacgcagcatcgatcatgctttcactgatatatatatgctctattggtcttgtcttgtcatgcttagacactacgatactatcgtatttgttgcctgatatgcctttgaagctcttgccgtcttcaggtcttatccccctttgggaaataccctgaaagccgttttggttaataagtctggtacaggtattattatagacttttccatctttccggtgttccctagaggtgaataccccggaaaataccggtgaagatagtgtatcttgagtaattcctctcttttgcaagaaatccccttgatagggtttcagttggctgttcaggaacgccagctgattaggatctagttttgcgttgctaactccaaaccggctatcttgagataatacgacttctttattgtttacatagttctgaacggcttccccggcttctcgcaggctaggcattctcccggtctggtcgtagatatgcttctgcattagatctatgatagtctttcctcgtgcttctccgtgaacgtcccaataggtatagtaatccttactattcttcttgataataacggtatcggatccgttgctcatcttaggggacgagttggaagatccggaaacaaacttccagcctaaatagagaaaaaactccggaagggaaacatcccttttcagtttgtcaaagtctactttcataacgtcagatttttaggttattacttttatctttacctagccctacattatcgctttgggctagtttgatgttgcttaatccgggagcgtcagaggacagaccgaagatcttctggactgctatcattgttggagccggtgcggattttttcagctcgtctattattttaggggaagggatatacccttcatccttcagcccagcgatccgggtaaaatcgtttttttttattgaatctgaaaaaatagaatcggttatttgttgctgtgttcttatgatgataggatgatcttgtatgttattcaggatctccttatcagaaaacaaaagatccggcttatatttcccagcgtagaagtttgacaggtacagttcctctgaaggctctaatttcattagcgaagatacgaaatcagccaccttatcgttgatctcctgcatgggatattttccgctgttggtatgcatcatcggaagtagctgctgccttatctccgtaaaggtcacattctctatgctttgttttggatcagcctttaacatttccttattctccggattgccaagagaagagtaaaaaacaatggatttccttaaaagatccctttcttctttgctcgtcaatatatcagaggatgcaagggagaagaggtcatatatatctctaggcttacatctttcatagaacgcctttatctttcctgcaaacaattcgataggattgacgtagtttactacaaatgaagtcttgttctctctgatgaagggaaactcaatagatttaacttccggtttgaatatatgggatcgattatgatagtttatatctagttttatcttatctccgcttcctgtcaccgtattatagtgcaaagagagagaatctagggtaaaattacttctttcggtcttcctatacccgttctgctggaaatagctatctaaagccttgttgatttgttctctctccgctaacatatcctctttagatacgtttttagagaaatcaagatccagatcgacagaaagccggggaagatcgaaaacaagcaggtttatagccgttccccccttcagtaacaatttaccgctaaactccggctgattgttaaggtcattgaggatattggataatcgcataactttctctattccagcaaccgtaaaattattttcttttgctagtctagtgatttcttcttgtgtataatcaaaactcataatatactcctttctctatttctttcattacatctttaggcgcacatacattccattccttgaaataggtatcacaacgggaaggatttgtaaggtaacttgttgtattacccatcttctttttacatacatcgaagaacatatccgataggtttagttgttcctgaagctgggacaggatgaatcctgtacgttgatacaggcttttcttttggtatagcttcaggcattctaacatatcttcttctattacggaatccggatcaacctcgattaaggcaaataacagttcttcaatgccaccggctaagcctatattgtttaagcagtcaattatggtttggctgattgatgtaaccgtgataggatagccggtatctttttttgtaaccaatggtttgtatataaactgcaaaggcttatatacataacgctggttcaggtactcaaaagaccggaagggagtagaactgtgcacataaagccagttaaattcctgtgtctgtaacatatagaactctaatgcagaatgataagctaggcaaccgttatcaacggaattgcaagctatctgatacttgttctgtatgttagccggcaaatatactccccggcgaatatgtgataacaaacctcgctttttccagttgtaaagacgggatttcatggtgttatatcctactggttgatctatgcttatcatgcctgtttctttatatttagatattatattactcattttacttagaatttatttcaaagatatcaaatttgatagtattgagcaaatttctaagtatattttttatatttaaacttgatattatcagttagtagacagataattaagaatatactttcggaaaaatattctcttatctttttctgccctgtatgttaatcccttctatccttagatacttgtatagggtagctctggaaactcctactatccggcaaacatcatctatcgtgcctatttcattttgtagatacttggtgtattctatagccgctagtttagctttccttttagcttgatctgttagaccgggcttgcgtcctcctattcgtccttttgcctttgctgaagtcaaaccggctattgtacgctcggaaattatatttcgctccatttctgcaatacagcataaaagatgaaacgcaaactttccgattggtgttgatgtatttaattgctctgttagactaattagagcaatgtttttcttttcaagagcttcttgaagttttataagttcgcaggttcttcttcctaatcggtctagtttccacacgataagctgatctcctgtttttaattttgcaattaaagcatctaaaacaggcttatttttattctttccagatattttttcttcacagatgtgatccactccgtataaacgtaatgcgtccagttggagatttaagcattgatccggagttgatacacgtgcataaccatatttcataatttttacggcaaaagtagcacgtacatagcctttgaaaaatatagagaaggtgatttttgaatttattaaaacgaacctttttttaaactgaatatgagattattaaaattaactttattactagtgttatgtgcatgtacacatagtgtttatgcacaacggcattatgtaggtatttcagccctagaagtaaactatggattgaatatttttggtaggaataatactaacttaaacctttcagtatcaaagtataggagtcgaacaacttactggaaaataggtttgaactattttgaaaagtcttataactacagttatgaaagcaatactgcggaagttccaacgatagtttcttttagctctacagcaaaagattactatattgatgctgcttatttcaaaacagttgcgacaaatctttcttcactttattttagcctaggtctaggtctttttacaggtgtagaagcgtacaagaggcaggataataagtatgatttcttacttggtttaaagatcgagcctgaattagaatactttgtatctccacgagttgcgatacttggacgtgttaagcagtattggagtccgtttagctatgcaagcaaatggaatacagtctggaatcttggtgttaaagtccttatttattgattatgatattattatcagctgatgtaagcgcattgattgacttattcaaacaatgtggcgaaatgctagccggtgtcggatttgtctgtgcaggtcttgcggttataaaaaaaataataactaatcatgagaaaatgaaagaagctataattacgtatatcgttgcattagtaatatttatactaatatggtcgcttatataaatatacaaatgactgaatatctagccactaattattcattatttgatctggcgatagttacgatagttattgtttcaattctaattttaggattggtctatttttccggaagtaaaaagaaaacggagtgtacagcttcactatcagttgaagaagaaaaatctgattctgatctagttttatctccacgcataacaatagtttttcaaaaggatctttcagatgatgaagaattaagtagagagatagcggatatgtatatttcaaaccgggcgtactattatgctggtaagataccaccattccagcatcaagtactttcggaaaaatcagatgatgtttttgtcaaatatgaaagtgttgatttttccgctttaagcaagattgatatataaataacatgtataaaataacaattaaaattttaagattatggtacaagttttgaaaaagagtgtagattttgttagtgtacacaagcgtattattatgattttagggcttttcctgctgacttttgttgttgttcctcaagttgtagaagcccaaagcgcattaaaaattagcagtttgtccgatgttgaatcgaaagcgcaagaaggttctgatacgattcttaatatcgcaaagtatgtattagctgccgtgcttggcatagctttagtatttgtgatctattcccttgcaacgaataatccccacgccaaggagtatctgctcggctggatcattgcggttgcggttattatggtagctttccttattatctgattaatgaggactataagaaagataaatagaccaattaagttctttggcttaacgtcgggacaatttggtctatttatgttggcaaatgctttgattataattgtttgcatatttaagcatgtgcatccggtaatcatagttagtgtcatgggagctatattctttgcttcaggtatcttattcaagaacctaaaacgggaacataaagctggcaatccggattatctaactggcttatcggttagatctgcaacccctaaacagataatagataaacataaggtattcaattttataatgaagcagaaatgatcttgaaatcctgcggaatacgtgatacagattaaggctgtcgctttttcttgcagagagtttatatctactatgtggtaactaattacaaaataaaatgataggatttattattatatcggcattattactgtgtggtgtcattacattactcgccatactttttatgcgtccttctgaagttcctatatctgataaatcaatagatctttcggctgtactaccgatccagaccataacggatagcgttatagtaaacggtagcggagatttaaccattggatacagattgtttcttccggaagtatttactctttcgcaggaagatgcaaaatatatacatgagaggttagaggggctttttaagatgttacctcctgcaacggtggtgcatcagcagtgcttttactatgtaagccagtataagaacaatgacttttctgttaatccattgaaagcggaaagtattaaacactttaataacaagcaaataataaactgctatacaaatttgtatatcacttttgccaatacagatttgaaaaagggagtgcgaaaaaaggcttctaatacatcgctgcttaaaaaactcaattatccttttaaacagccctacaagaactatgaagaaaggttatcagagattgaaccgaaaatcttgaattttgaaaatgggttatcttctataactcaatttgagataaagaagatggatagtaaagacttaaataatgctgtctttgattatcttaatctctcgtatgctaaaccaacaaaagacgctactcaagaaacagttagcccaattatggtaactcctagcggtgatctgaaggttggacaagaatatttagcgatgctttctcttaccgtggaaggggaaaatctttatgagctgaatgtacccaatacgggtaaatcaaaagcgtatggaagtacgattgagcttccggagaatatacagtctaaatgttctatgttgtacccggttggactaggtttgcctttcgatcacattgtaaatgttgtgatagaaataacagatacagatactacgctaacggctattaatgctgaaaaaaacgggctaaactatttgactaacttttatcctccggctaaagacaagcaaaaacagcaagaacttttctgtaaagaaattacggattttgattatcaaacagcttatacagcttttaatgtgattatcaatgatccggatcgttcttctctaattcggaaaatttcattggcacagcagggatttagttttatgaaccaaagttcttgttatgtcgagaatgcggagttgtgcaatttatttttttctaatataccggggaatgctcggagcaattataggggatttatcaatacgaccaaacaggcgatttgttatttgcaaaaagatagtatttatatttctgatctgcaagggcatttgtataatgaccgattcggaaatcctgcattgataaatttatggaataacaaggctttaaacaatagaaataaaatagtaatcggtccgtccggctccggaaagtctttttggctaaacaactatatttatcagtcttattctttgggtaatgatattacaattattgacatcggtggatcttacaggtctatgattagcctgcaccgaggtaaatattttgattctacaaatcagaaacagtttgcttttaacccgttcttgtgtgaacgtgatcggaatggtagatatatttatattgatacttcagatgcagaagcagccgaggatcttattaaaacgatctgtgctcttttatcctatatctggaaacaaaataagcctatcgatcccaccgagaaagctattcttagaaaatcagtgatcgcattttatgagtatgtaaataattcttctgttgatggaacaaatgaaaggatttttcctaatctgatagaataccggaatttcttgcgagatgtatttatttacaaaatgactgactttgaaaaacgtagatttgagatagaggaagtgcttttactactagaaccttacacggatggagaactatcctttttgttgaacgcaactgaaaatattgatatagttaacgatgatttaattgcgtttgatatggaagacgcagcaaagaaggagtattttcctttggtagcgattatcacgcttcaaatggttatcgataagatcaagaagcgtgaaggagttaataaggaattgattatcgatgaagccctagactttttaagtgatgataagtttggtgattttatcgcctatttgtatcgtacattccgtaaaaaagacggggctataacgatagctgcccaaaatgtactgttcctgaagaactgtccaccggcgatcaaggattcaatacttataaactgtgatactaaagtaatactggatcattcaagttatagaaaggagttgcccaatctgcgagatattctttctatttcagaagaagaactagtaatgatagatagtctgcaaaatagggatgatgagatcaagtggagagagttcttcattaaattgggaaacgaaacctatgtttttcgcaatgaagtatctgaatttgccgctgtcgcttttgattcaagacaatcgactgtggttaggctcaaacagctttttgaggaaacaggatctacttatgctgctattaaccggtatttagaagaaaggagaaaaaaatatgaatgatgctgtagaaggattgaaccagataaaaggatggtcgggagaatttaacaatacgtcttttagtgtggcagggtatatcaccgctgcaatgttaggcgtttctctgatttttgtagtctgggctttagctacaaagaaagataatgcaagaacatatctagtcgcttggtttgtggctttgatatttgcgatagtgtttattctgcgataataaatttataatattatgaaaataaagatactcttatttttttctgtgttgctgttaagtagctctttttctgttcaaaaggctagtgcgcaatgggttgttaatgatccggctcacatgggaatgaaccttggcgaatggggagcgaatgcagcgcaatgggttaagcagcttaatgaaatgattgatgctgcacatatacgagaaaatttacaaaagatagaccaactacgccaactacaatctttagtagaacttgctgaactgttggatgatgtagcttgtctaagtagtgattaccgtttttatatgaatataggcggtagctatcattgtttaaagtttttaaacttccaacaagttacggtaaaccttaatttgagcacagatctattatttaaggttgctactgtttccgactatttcagcatgaatagtgagggaagaatgtcctttgtcggacaggtaagagaagccttagaaacggcttctgctgaaatgaaatcttttaatgaaatagtaagaagtgagatcataaaagatgcaagtcgaaaacatgtagggaaaacatattatagcggaaatttatctgcttttagtcgatatactaattaattagccttatgaacggacaagatacttttttatggggattgcagattaatgattcccttacaacagaattaactgcgcaaatgacggtaattgcgcttggtgtagcagttatttgtttcatctgtaatatagcttataattacctatatcatggtgttagtcagcttttaacatcggatgaaaataagtttccggatttgatggaaatagctcgctgttttgctttaatattctgtctttcgctatatacacctatcgcaaaaactgttgttggaacccttgaagtaataaatgaagcaacatctttaagttcagtccgggcacaggagtttgcggcttttctagacagatcagcggaagaacagcacaccatgatagccgataatgaaaaaacggcacttgaagcggaagtcgctgcgggggaagatccggaaggtgctatgaataaagaactacaaaatatagatcaaggtaataaaatagatgaaagtgcatctacattgaaacaaatctcccaaatattaaatcctgccaatttcgcagcaatgctcttacatgctctagccgcactgctggtcgggattgtacaaattatcatattgggtttgggcgttgtcattgtaaagatccttgtcatattaggtcccttcgtttttgctttttccattctaccggtattccaaaagcagctgtctaattggtttggtacactgtgttccgttggtatggtatttactgtgattaatattttaaatcagataatgtggtttacatttaagtcaatttatgattctgacgcattcaacgcagtagatgaagcgacaaaacagctacaatatttaggcatggatcttgctttgatcggttcttattgttgttgtttctggttggcaagtaagatagtcggtcatggtgatgccggtagaatcatttctaaaacggtatctattgtaactgctgctgcaacgatggcgattgcaggatcagcgatagcagggggggctacaaatgtaggggctgctgcttcattaggtaaaagtgttatagataacgaagaataaataaatatgaatcttacaaaatttaaaacagtggatcaggcttttaaaacaactgtgattgttgcatcttcttgttgtctgattatgggtattgcatttactgtctgtttcttctatttgtcaaacaagatagatgcggcttatacgaaggctttagtacttgatacttcaggacaggtttacgatgttgcagccattgaatccgcagcgatgcgaaagtatgaatatgaaaatcatatcaaaacatttgtttcgctgtggtactccttcgatgaaagcacttatgagaataacgtaacattagctcttaatttgattggtaatcgaggaaaagagctttacaacgaatataacgatattaatatgcttaattctttgattcagaaaaatatacgctatggcgttataatcaaggatatacatatcaatatgcaaacagttccgatatccggggatatactgtttacgcaaaccggctatcgtgctagggggagcgtagcacgtgatatttctgtgaactttactctatatgatgtatctcgatcacgtgaaaactctcacggtgttaaaatcgaaagctgggacgttcgatattcggaaccacgagaaataacagatgaagaaaaattaaaataatggagctatgggaaactttttaagagaagcgttgaaggacaaaaacaaattgttaatgttagtacctctgcttttgggcgtactgtttgtaatagttttctttggtaaaaaagaaaaaccggctgaatcagcatccaatacagaagaagtgaatcaggcttttcttgaaccggacacagaaggagaaaagaagatcgctaataaggtagatgcttataaacgtgaacaagaagaagctgctcgtaagaaacgtgaattggaaaaatcacaagtaaaaggaagcgatttctattttgaaatgcagacatccgaagacgaatacaacgagaaaatgaaagctcgtattgaaaaaatgaagaaagatccattggacgaagttactagcgaatacaaggagcgaggaaaaaaatctaacagtgcattttctgataaaatgcgccaacaactaaatgatattgaggatcaagaaacctttaatcagatagtcaaggaagcaaagaaagaggaaagaatacgcaaagagctagaagaaaatgcaagattccgggatgaaatgagaaagaaatatcaggatcaagcatcaggaaaagatatagagaaatctcaagagaatatttttccgaaagtaaatgattctgttcctaaagttgagaaagcttcaaagccgacttttatagtggaaaatggaaaacggcgtcgccggtcacagtttactattgaccaaaaagtcaatcttatcaaagctgctatttatggagatcagaccattgttagtggaagtgctgtccggatgcgcttgttagagcctttatgggttggtggcgttgagatccctgcaaatacgatcttctacggaaatgctagtgtcggctctactcgtttgaaaattacggtagagaacatacgatatgggaaatatataagtcctgtcgcttttactatttatgattctgatgcgattgagggattgaatttacccaataacatgaaagctgaagctgctcgaaaaatggaacagggcttgcttcaaggcgtgcagcttccgatttcttctattggcacagtaacaagtgaggtaactagtgcgatcacagccactacacaggttactagacaaattttaaatcaaagcctttctcaagtaaaggttcatttaaaagctaactataatatgtatatcaaggaagaaactaatgaagacagaaaaaagagagaggaagaagaagctgaaatagaacgtctgtatagagaaatgcagatgcagcagaatgaaccaaagaaaaagaatcctttaacccaactaattgaagcattataatgataattgatatacttaattttatggtagctgtagctactgtatttttggcttataggttctttatagaacgctctaaagggaaaaagatagcagaaatgaaagtactgatgtatagtttaatatcttgtttcgttctgctttggattataaatatttttattggttttgtaaaatgaaaacattgctttttatattaatcatgttttgtgttccattctccatttctgcacaggaaaaaaaagaactggactcccaaacaatttatgtttcgtttgataaaacgaaacatatagtacttcctgcacaagtaagtgacatttcgtatggtcgtgaagattatgtaaaagtggaacgggtggataatgttcctaatgttgtccgcataacggcacaggaagaagatttttcaggaacgacaaaccttatcatagtttgtacaaacgggaatgtctattcttataaaatatcctatctgttaccgggaatgacggatcactgcggaaatatcgtatatgccggtgatgtggatagatcacgttgttataacgtaatagtcaataataacaatactacagaaatgttttttccagcagatgtgttatatctgaaacaaggaaatgaagaagttttcggggttgagtattataataatatggttaaagttggtacaacttttgatgcctttgaaccttctaatctgtttgttatcgataaagatctgaatacctatgaaattaccttgtttaaagaccatgctcttacttactcttacaactttgacgatggtcgcaaatatattgcacacattgatgtaaatagcatagagatggataatcttatcaataaactgcactataaaaagcgtaatatcttcagcttgggagttataaaaaataagtttgagatgtcccttgcaaacctatatgtaaaagatgatttcatgttttttgtatttgatataaaaaacttctcaaatatagattatgacgttgattttattaaatgcttccttcgtgatcagaagaaggttaagaactctatccagcaggaagttccgtatgatccggtagaacaaaaagactttgataaaaagatattgggcaaaagccaaaatcgctttgtcctagcattcaataagttcactatcccggatgataaggtttttgagatcgaaatgtttgaaagaggtgggggaaggcatatgaaattatctatattgaatgaatatatattgtccgctgaattattaaaataattgtcatgaagctacaagaggttctaacagaatatcaatataataatgtcgggcaatttagggcgattgcggaaagtttaggttacaaagaagcctataacaagggttctttgctttttacccggaatgacgaagtatttcgtatcgatatggataagatacgttcacacacaaagcgagaaccggatttatctgcggaaaaggcttctatggatcgtgtttgccagttctttaatcgggatcaggctttatctcccgactataaaagcgtattaaaaaatgaaggggttgatattgttaactggggtgatctaaaaaatgatgccaaagatcgttttactgtgatcgatcataaaaataaaatctgttataccggaaaagaactatatgagtatgctttgcaaaatggttactcgttagacgggaaaggcacaaagttagagaagggtgtattatccggattaatggatatcaatggtaaaccagctaaagttcggttgcatgaacacggtacttctattatatataggaaggaagcgttaaccataccggatcgcatttacggaaagaaattatcgaagcaacagaagcaagatctacttgatggcaatgtgatagtcttgtcaacaaaaaaaggagatatacttcttcaggtcgataaggatctcaacgctgtggtggtacgttcggaaaaagaattgtctgttcctgctaaaattggagattacgaattgaccgcagcagataagtatcttttagcgaatggtcattctttagataacaaaatgatccacactcctgaaggttacataattacagatatagctatgcttccggataagaaaggatatgctttctcaaacatccagaaaatatcggaaacaaaggcacagcagattttacaggcaagagaaatggcaaaggataaagagtatcttaatgataagctaaaggatatgcagcgtaccggaaaaatcgatatagacgagttgaaggataaaaggtatgagcaattaataaacagccattttgccacagaacataaggaatacctatcttatctgaaagatgaaaatccggataaaaactataattatgatcttgaagcacgcattaggttaaaggctggggatatgttagaaaaagaaggaataatcgccaaaggtacaactgaaaaggaattgaaagaagaaggctttaaagtcgagaagatccgggaacaatatcaggagaaagtaacgggtaaggatcctgttcctgatcgagatcttgacaaggagttaagagaagccgttgtcaagaatgactatgaaaaaatagctagtttgaaagaggaaggttacaagccttcagaggaagttattagaggtttgggacaagatacaaagattgatcagacgcaagctatcgttatagaaaaactatttgggatgaaacctgaagtgcaaaaagcggaagaagtaacacaagcaaaggaagaatccaaagaagcaaaggtagagcttaatgctgatcctgctagtgctaaggtttctccggaactagataaagaatttaaagaagcagtagagaaaggcgattttgtaaagatgtcacaactgaaggaacaaggctatcaaccttccaaagagttgattcagtctttgaatgaaactgcatctggcaatacgatgatagccgttcagaagatatttaatctgaaaggctctgctaatacgctcggagatgttaagctagcacaaggtcaacaaagtgcagaaaaagatctaaagcgtcctctcgccaatacggtaaataaaatgtttgccgatttataattaatagatttttccgaaagtaaaaatgttatcacttaaaaataaatatcatggaagattacaacaaattggtagaaaagaatcagactggagagattgacgatcttgaatttttattagctcaagaagatttagcggctctctacgttgcggatatgcaagctgaaggagttagcccgaatgcggaaaacgctgctgaatggttgctaaaatatgaaaatgaacacctttatcaataagtcatggatggtcaggcaaatgataaggctctgcaaaaatttgcggatcttatggttaagaaacttacggaagtcgatgcggattggcataaaccttggtttacaacaacaggatatggattaccacaaaatattgatgggcgtgtttataatggaatcaattccttcatgctttttcttcttcaagaggaacgtagtttccagacacctgtatatatgacttttccgcaagcaaagaaacaagggcttcacataaacaaaggagcatcggcttttcctgtcctattttggaattttatgattaaagacgataaggggaataaaatttcgatggatgattataaggctttgactaaggaagagcagaaagaatataccgttattccttatactaaaccttatcacgtgttcaatgttgatcaaacaaactttgcggaagtatatccggaacaatggaaggcattgaaggataaatttagttgtcctaaattgaaagatgagcagggaatgttttcatcgccagagttggatcacatgataaaacacggtacatggttatgtcctattatttcttctttctctgacaaggctttttttcgtccttcagaggacaagatatatttaccccttaaaggtcaattctatacaggagaaggattttatagcacattgttacatgagatggcacattcaaccggtatagatacccgtttaggacgtgaaatgaaaaacatgtttggtgatcccaaatatgcaaaagaagaattaatcgcagaatttaccgctgctgtttcttgccgttctctaggtatcgtttccggagtccgggaagaaaacgcacagtatttaaaaaactggctcggagcgatcaaaaaagaacctaaattcctctattccgtattagttgatgtaggtaaggctagcactatgattttgaatgaagtctgcaagtatgagttattgaagaaggaagaacaggaaaagcaacaggaagaatgcaagcatatagagaataaaaaagtagatgatagcaaggatttttctgaaacccggaatgatgaaaaattatcaccagcttttaatatagctctagctgctgcgctagccggttcgtttaaggaattggttaacctaaaggagcagggatataaactgtctgcaaaggaacttgatgcgttaaaggatgcagatccgaaaatatatattgccgcacagaatatatttaatataaagttggatgatcctactccttccctacaattttccgaatcaaaaaataaaaatgaagtcaaacaattatctttaaatttttagcgtatgtttataggtcatgttacgggttatcttggatcagatgccaagaaaacacagaaaggttattcattcaatgtttccactaaatataaagagggaaacgaagaaaaaacgttgtggatctgttgtttcttaaattacgaaacaaaggttgcggagtttttaaaaacaggaactatggttcatgtgtatggggaaatcactgtcggtatctttaagcgtgatactggtgatacagtcccttcagtaactatgagtgtagataaggttcaattactctctagcaagaataaagaataatggaaccagcaaagaaggaattatcatttgtctttatattgctttccgtaataatcgggggtgtgataatctttcagtgggttttggtgaatgatctttgttcaccaagcccagctgtattattgcagttgggaaagtttttacgcaaagctattatgtttcgattcctatatgtagtattattagctgggttggctttcctattccctgtacaaaagagaagagatgaatccttgaaatatgtatatactgccactacattaatcttagcaatagccctaatattaggcttcagtaatgttctatcatggtacaatttattagtttttccgatagtatttataggatttacaatactagttatccaaacagccggtttttaccttaaacggcatgtggtatctgataaatctatctttggtgtatcacatgaaaaatcagagttttattttgattttgaaacagtagaaggaaatcttagaatccataagccacagcaaaatctttatattgacggtggtccgggatctggaaaatcggaaagctggattaaaggcatcatctatcaatgtgcagagcgtaactatgccggatttgtatatgattgggaaggagatcctagtaaaccgggttcacctattttgtcccggatcgcatacggtagtatagaatattttaagagaaaaaatgtacctacaccagcctttgctttcataaattttgtagacatgtcccggacggttcgtgttaatgtactttcggaaaaatatgtccctaaaggaagcgaatccttgtttattcgtaatatcgctactaccttaatgaaaaaccttgaaagttcatggaaggaaaaaactgatttctgggcgaacaatgcgattaactatgtatattcaattgcttataaatgttacaaagaacgagcaaagggaataggaactttaccccatgtaatcgcttttgcattatcagatagtgatctggtctttaaatggctctctgaggatgcggaaattgcgctaaacatgtcttccatgttaaccgcatggcgtttaggcgcacagcagcagaccgctggtgcggtatcttccgcacagactccgcttgttttgcttaacaataaatacatcttttgggttctatcaccacttccggaagaagaatattcactagatataactaatccggatcatcctacactattgtgtataggcaatgctccttcaattaaagaagctgtatctcctcctgttagttgtatcgctagcgttgtcatgtcgcaaatgaataatcccggcaaacaaaagagcgtttttatggtggatgaatttccaacggtaaatttgcaaggtatagatgtatttataggtacagcacgtaaacacaatgtagctacaatcttagccgtacaggactttaatcaagcaatccgggattatggagagaaaagtgcaaatatcctgcgatcttcttgtggtagccaagcctatggaatgaccggtaacgaaaagacagcaaaggatctagaaaatcttttgggagaaacgaaagaagcacaggaatcgttctcacatcaagaatccggtactggaagcatgaccgaatctctgcaaaaggagaaagtagtaaaggctcgtgaagttgccggacaaagtgttggtcacttcatcggaaaggtcgctggcggaaaaccaccttattttaatacacaatttaatatgtgtaagtttatagataaggatattccggctttttccaaacctgtaaatttgggagatggcaaagaagaattagagtatgatataatggaagaaatagttagtcaacattatctttcaatcatttcaaaagtaaatgcgatcttggaagatgtaaagaataagacagaaacggacaataaaaataaggaaaaaaacatgccgaaagatcataatcataaggcatggaaggaataaaagaggtatttttgtgaaaatataaaaaaaataatatatgaaaagtaggatattgatagttttattatttgccttatcttcgtgtggatcaactgaatatgaaaaggcaatagcggattggcttcaaaccgatgaaaacggtacttggactgatcttaagtttgaattgatagagttgcttgacgaaaaagatgttacagtttccgacagcttattgtatttggatagtaaagctgctcaacaggtacagatgatagaaagagcggagaatcctcgtgctttggtaaaaccgcttttctctgattacaccaaggctaaagataatttaaaatggatagagaaaaagaaaatggagtataaggatagagatagtacggaggtgttagccaaactattgaaatgcaagtatgcaattgttccacctagtttaaaggctaggcaggagagagttggcgagtttttactcgctcccgatatgaaaacgtgctggggaaggatgaaagctacgactaaataagaaaaatatgaaggttcagttttttaaagattttagcaagttatcagaaacgagcgatttgtttattgtagaaacagatcaatttgggcttattgatggcaacggcaatagctatgattttgatagcagagaaaatttctagaaagaaaaatataagggtttgtttactttacatacacatggatctgaatttaaaatatataaagatgatgaaaaaaattaagctgcatttgtttgcgttatgtgctactctagtattagtttcttgtggtggatcggataatgatcctgtttttaataatacatctgctgtatataaggtagtattagaggcttcaggggatgattatacagctgaagctattattattaatccggataacgtatcaattatagatgaaacaagtaacacagacctaaaacaaagttctgtaacggagtattttagcggacggaaagtttatataacctctaaagaagtgaaggttatttctgctcaagggattattcttagcaaaagtaaatccggtgctatattgaaaatgacagtgtatcaggatggaaaagagatctatcaaaatacagtttccgttccggattcagagaataatacaaagtctatacaatatactaatataaagaactagattatggataaccaaacggctataacattgaagcccaaactaggttattgggtttcaaagtattttgtgataattgttgtcgcatctttactcccgttctctgctatttattgggatttagaaatgcctgtacactatgcgttaatggtgctgtttttagtcgtttggattatgttgtgttacacatatatagacacgctgtttgctacaaagtggattattactaaggatgaactgattttcaggcatggtataatctcaagacgagaggaacatttagaattatatagagtgattgattattcagaaaaacaaaatttcttgcaattagtatttggcaacaagacagtgaaagttatatcaggtgatgcttccgatcctattttatatatgtatgggattgatcggaatattcctattatagatactttgcgtgatagagtcaaaattgcaaggaaagaaagcggaatttttgaagtagcaaatagatcttgaaaaaggaaagaaaacttcagtttaaaaaaaggttcgttatattgaatgcaaaattcaaataaatatttaaaacagcaaaaattttgtggttaaatattgtaatttttatgttttctcccataattcaggctgaacacatttccaaccagcggcagctaaatagtcccggattcgttcttcaggaactttgccccctttttgaaaggtcgctttatcatatttcgcctgaataggtgaacgtagggaatttacataccactttctttgtttaataagctcgcggaaagaatcttccaaagtcagtttatccatttctttaatattaaaaaatgtatatatagttcaatgtatcaaaaaaatcgaatgttatataacttatatatgttatatatattgtatatgttatatatgttatatatctttgttgggcgattaattcatgcaaagatatagattattaatttaaaacataaatgattatgggaacaacaatctcaaacacccaaattgataagagaaagaaactgttggatctgccggaagacgttataactgtgctatccgtacaagcagctaaggaagggaaatcagctaaagcctttatggaaggcttattgatctccgctgctaatgatttagaagatataacaacttatacgtttctttccaagaatcaacctgaagggcatgtcatggttagtgaagccgaacaaaaagcctttgaacagaaatatggtttatcatgaatgtagaatattcaaagccatttttaaaggcagtagataaattatcagggaaagttctgtcttctgtccttgatatgatccgggaagtgaagaatgctaatggtattgatgaaattactaattgcaagaaactcattgcctataaatcagtatatcggattcgtataggagattatagagcattctttattttccacgttaagattgtagatgatacagttaaatttgaatatctagtatcaagaggggaagcatacgataaaaaagtacagtcagagttacggaaaaaggataaatgataatttattatggaaaaagaattaagccgggttccacgcctattaagtgaaagttacaattctgggctaattgagcgcttatatgattctggcggtagtgtaatgctagatattataatttacctttgtgggaatcatattagagatctatttggtgaatcatggttctcaatagaggatttttgtaataaaatgggttataatcggacaaatcttcaaagaaaactatctaaggaacagctgaaggatctttttggaaaacgctcacctcattatatctgtaaggatataaacggggaggaaataagccaccccatagaaaccgtttttgaagccgccctttataaacttggcttagaaaatatgtcttatcctgtttctacaagcgaaggcacttcatatatatttattcagatccttaccaaatttgaaatccggacaaattttaaaaccaagaaaggaacgaaaagattatatagtgctactctgaataatctgataaaggattctgtttatactctctataatctaattgaaagtcaggattatagagagttaccttccaaatatcgatatttctatttggaactatcgaaaatgatatatcttattaagtataaaatcaaaacaggagatgcacctagttacagattaaccgttgatcagttggctaagttgttcaacctcaattttgaagagaataaggaaaggaaaagaaatgtaacaaaagttttgaaggggataaatgaacacttgagatttaccaactttcaatttaagtacgttaaaggtgctaatgataaatgggcatatacggtagattttgaattttctcaagaaacgcttgattattttgatgaacgctataccgctatgtttactcaaagattctatagtgatctgttatggagatacgctggtttagcttttcctaattgtgcggtaggcagagatcgggttaacaaagttgaagatataaaatctgatcgaaacttgtatgaagattatttggcatgggctaattctccacaaaacaaagcactgaaagaggaagtatatagggaaaatttctttcgggtatttggaaaaacccctgaagagtttggattaactagtaatgccccgactgtgacacgtgagccaaaggaatttatagttaaaaatccacctactgtgacacctgaaccggaaaagattatctagctgtgtaaaacactacacttttcaattctattaacatttccagctgtgtaaaacactacacttttaggtttccagctgtgtagaatgctacacttttgggtttccagctgtgtaaaacactacacttttaggtttccagctgtgtagaatgctacacttttgaaaatttagctgtgtaaaacactacacttttcaatttagctgtgtaaaatactacaccatattaaagatatcgcaaaaaattaaagtgttgatttttagctaattaatgaaaagtgatttttcccagctgtgtaaaaggctacaccatatttcttaatataacctaaaaacctaacccccctataatcccccaaagggggacagaagaaatgaccggaaaaatgatatttttccttcagtttatatcatcatactttcggaaaaatactatcgggcatgacaaattgtcatattttgaggaaagtaataattctccaatctcatttaatcagaggtgagaaagagaaacaacagctattttacttttggtatacgttaagtaaaatgttttttttggcatgtatcaagaaaaaacacattttactttattgttttactaaattattttactacctttacaaaaagtaaaatgataaaagcataatagatatgactgatgatgatattaaagatttgaagaaagatttacttcagttgtttatgaagtacaatgtttccataggcttcacttgtgcagactgtagtgatacatatggattatatgatgatcatatagttatacaggataataatagtagggaaaatgtactagaaactgatggatggtggttaaatataagccatttgcgataatttcaaataataagaaaggagtaataatatggcaattgatacagaaaggatatttcttttagcaactaaaaaaagccagcgagtggaaaatctgacctattgtataggtgtgcatcgattaggaactccaaacatggagtacattctaggagaaacagacaatgaccgtgaatataggcaaggtgatgaagtttcatatatttatcatgcggaatatgcctatacgttgcaggaggctctagattggctaaataatgtaaattagtataaaatgaaatcctcaataaatgtttaatgaagaattaaaatcctcgtattataatgaagataggatatgcacgtgtatcgactccggatcagaatccagctttgcaattggaagcattagaaaaggctggttgtgagaaaatttatcaagaaaaaaaatcagcgtttaaagaacgtcctgaattaatccgggcattagaagatcttagaactggggatatcttatatgtctggtcgttggatcgtttaggcagatccatgaaggaaatccggacgaatgtagatctaataatgaataagggagcgcatcttgtcgatgtaacgcataatatcgatacgtccactccttccgggaaacttttgatcccgatattttcaatgttggcagaaatcgatcaggttttacgtacagaaagaacggttgcaggttgggaagtcgcaaaacgtgagggaagaacaggaggaagaaagcccggcttaaatgatttagcgaaaaagaaagccgagcaggcaaagaaaatgtatctgtcaaaagatcccttctattcagcaaaagagatcgcttcaattctcaatatctccacgagaactttgtataaatatttgcgttctgttggggttgaaccaaaacaaaaccagtaaccggttatctcttaatggaaagtaaggtaggaaatcccctaccctatttccattttaacttgttgcaaagcccctttgagttctttcattgtgtcccttttgtgcttcttgcattcttccggctgaatgatttggaactgttcatcttggtagttgaccgcaccgcaaatctttccgtcatggtcgcaaatggtatcataaccgccaagtgtttcacttagccatagcataccgcaagagcattgcacttttattattcccatatatatatttttagttgattatttacatgtcttctattgtcaatgatttactaattaatatgataaggaaaggtaaaacaacctttccttatggctatttttttcctaaagtaccgtttatgaatttgcgtttatagcttgctatttctttcttattttcttccaaaaatgcttcaagcagatttcctagcatttgcatcattggaacttttgacattgtagatagtattttaagttcttgatggaactctctaggtatctttatcgtttccgtgtctattatctctcttttagcgaaaagcaaagaaagacctttaggaaaagatgattcgggaaattctgaaggttcttctgtcatattctcattttcctgaatgatttcttcttcttgtactggagcaacaactttagctggttctgtggtgctggctgctggttgtacttccggaattttctcttctgaagtctgttgtgatgaaacagattttatactttgaactttcttagcttcttctttaccagcctgtaccaatgcgaacattgatgttttgggttttcctgtatttttcttttcttcagccataatttcattttttaacgtaattgattaataattgtatcatttcttctccgaaatcatcacaggtgtgattatagttgtttattatcgtagaaaggtttctttggtaattaactttgctttccttgatatgattgttcagtagctcgaaaggtaaattgtctttgtttgctataagctctttatattcaagcaaattaggtgttaccttgttaggcaatccttttactattgttttgtaacctagactttctcgtttagataagatattttccttgtagtaattgtagaactttacagtgtgcaatacttcgatttttgaaggagcaaaaggtataatgaccacatccatcatcattagggtttctactactcctgcctgtttcaagtttcccggaaagtcaaccactattatatcgaaactttctttgagaaattctatgctgttaatgaagtctgatgaagatatactcattacttcatactcgtcttttatatcctcttcctgttgtgcttcatcgaaagctcttaactcccccattgtattttgcgcatcgtctatatcgacaacgccaatggttaaacctgtctgctcgtggctctcatgtacatatcctgcgaacaaggctgttaatgttgatttacctgttccaccttttgggttctcgaatgctacgaatatacccggtaatatttttcccataacgttacgagtttaaatttttcgcaatatatgaattaataatctaactaacaaattaatcagcttgtttaacaaataattaactaataatcttattacataaccatttaataaactaattagttaattaagtggttaattatacaattaatagattagttatctagttaataagttatttgatttatttattaattagttaattagtttatggattaattagttttctgataaactagttaactagttgtttttttgttgccgtgctttcagttcttccttttgttaagttatctggttacttggttaattagggaatcagttctttgggttgatttttccgaaagtatagatcttaaagttttggtgctttataatttttatctatctttgtatatgcaaggtgtggttttgtagctacaaaacccaccttgcgacagccgagctgacgagtgatgttcgtttcactcacatacattagaatagagaataggaatatagaatgaaagagaatagaactaaagttattcgggcacgtctttctgaagaagaaaaggaacaggttttcagacgagctaaagctgaaggtgtaacactttctatgtatttaagaaaatctgttttaggggaaaggataacttcaaaagcggatattcaaaccgtctttgaactgaaaaaaataggtactaatttgaatcaacttgcaaagcatgttaactctttacctgttgatgaaaatattcgtctttcattggaaagtatagagatgtacattaaagagttgaagcaaataacagataaactaatatgatagcggagatacaagacccgtttgtaggagaagcattaaaccgcaaaatcgattatcagttaaagaagattgaaagcagtgtagctagggaattatataattcttctggtgattctcttattaatatgtatcgtaatatgtcccttgttgctggtctgaatgatcgtgtgaaatcaccatatatagaatttattcttagcagcccgataggggaggatcttccggacgaaaagttttctgaagtagcgaaagaatatttggaaagaatgggatacggtgattcttgctacaccatcataaagaacgatgataaggaccaccgacatgtacatatacttgccactacgatagacttaaacggcttgtggatctctgatagttacagcaagggacgttctggaaagatcatgcgagagctagagcttaaacatgggcttgaagttatggagaaaggaaagtcttcccggaacaagacgttgggagaatcccagtaccggcaatatttctttgacacagctttgcacaaggctttgcgcagccataatgcaaaagaacgggtgaaggatcttctagggcagtcggaaacctttaaaacgattaatcctgatatgactaaggcttatactaatgcggaatggaaaatcatattgggggaagatacatacgaaaatatgttagatatgttatcaaaaggaaagttctttaatccattactcaaggacgagttactttccgtcatggatcgtttgcgtcaggaatgcggcaacatgaaagagttccgggatcgattggaaaaagaagggtattatatgcgtctggtatcggacaaggggaaatctcattatgtatatggcattcctgataggggcttttatctgaaagatacagcccttccggaatcgtaccggtttgggaaacttttgttcgccggaaaacaaatgaccgcagacgagcaaaagcattatctgtataacaagatctttgcagttcttaatggttcatccagctatgaagattttaaagaccggctagcggagcataatataaatctgatcgagcacgtcaacggtaaagggatatacggcatatcctttgcccttacaaatgtcgatactccggaaatctttaaaagctctgatgtatcaaggagattaacctatcagaacatacaagacttcttccaaaaagagcagaatccggaacagggaaaagaacaggagagagcaacacccatcgatccggttatcgtgtgttatgcgagtaatccgcacgaatgggagaaggatcttatctatatgtacccggttgccatgtcaatggctttagataacggatcagggaagcaccggaaaggtgatgaagatcttccggacaacaagaaaaagaaaaagcgaaataaaggattatcatattaataacaaaattgaatagaaaatgcgcaaaaaaaagaagcaaattagtatggaagcaaatcgcttcaaaaacgtaagcgaattgataaaatcgtttgaggagtattctgggttcagtattgatccggaagagatagatactcgtgataagctgttggataaaatttcggaaatacaggactatttatctaatgaagtatcagatatatgttctcagtattattatgaagcaggacaattaatgcctgaagatgaagattaacgtataacgaatcggaaatgaacgatatactattcaaaaaaataaaaagagcaaacagtaaatatgctgaatacttatcagcttgcgataaagtagctaaagcagcccaaaagcatataaactggaacgatagcgtaggttgtgcctatatgccgggtgacggtctttgcatagagattgaagcccatgtttgcccagctacaagattttttgagctacctgatattatcggtaatgatatgattgatgaatacacatatcgaaccaattgcatttaatttaaaacaagttaatcatgaactacagcgaagttttaaatccataccagccgttagaaaccggcgatttcatgtaccggtattatattaatgaccgggagtatataatttattcaccggaacgaaacaagatatcctgtttggagttgttcgatttcaaagatcttagcgcttatcaattatctatatccatccaagcgaaagtacaggtgcaatcggaaagcgaggaattgaaggagtttagttttgatcacgtatgtagcaaagaagatctgatagcttatctctttgatattactgaaggaaaaacggagatccggaaggtgagaaaggtttcaaataacgagggctatttcctttttgaactgaagagtgcgcataagattcggaacttttaccagttcaacccggaaagtaaagagtatcagctcgtgtttgacaatgatatttgctgtgcagcgatatatgaagatgtaacttctgatgtcgtaaacgtgtgctggaatcctgctatctttagtatattagaaggacagacagagcagcagaatacttcttatcttctgccttcttctaatcctatcctttgtgcgcatgtctgcaagaaagcgcaggagagaaacgctaggatcaatctgtacgtaggcaaaaacggcatggaagctcttttgttcttttcttactatatagcttctaaaggaattgagaaaagcatttctattttttccgacagtaagcaggtgactgtagaaatggatcgttggaatcctgttacggtggttaaacttatgtctaagatgcagaaaacgatcaatgataagttaaggaaacagtttggggaagaagatgaagtgaccatttaccggctggaatccgtagcggggaaatcttttcttgcttttcaaaaccatcctctagcaatagatgtgttctttcggaatatcatcccgttatatggtttggaaaatattgagtatatagaaatgtagcttgttgtttatctgataaacaagaaaaaattattctaaataggaaacatttttatagggaaattgttatttttgtgcagtcgtaaaccgaccgtgtttttacatattgaagaaaaaaagcgtttagctgatttctgtgcaagcgaaaagtccaaaaattgcattatacacagagaaacagataaatgctccccgtgatatgcggggggtatctcctgtttgtgtgtatagggcttggactccctcgcttgcggataggcgaatgcccttccgctttttttatgtttattggcttggtgtagggcacaagcaaaaacattatggcaatggaaaagacacagcgaaaacagtccctaaactctttgtcaaacactcctaagctgtttgacctaaacgaactactaagctcgctcaagatcacgcccggacaaatgggaaacatgaaagggttgatatacatcgaagggctgacggaaaaacaagtacgccaaaaattaagccattcaaaaatcatcagaacaaatagattcggggttaattcctgcctgtattatatcctctttgaggatgtaaaggggagatatttgtgcctgtttaatagtgacaaggaatgtttcagagcgttgttcttcaactatatattactaaattaataccctctaaaatagtcattccattttgaggatgaaaaaagcttgatatacaaattgttaattttctctaatagggggggtgaatttaaatttgtatttctacacgttttgaataatagaatatatacatatttttgatacataaatataaattttatcatggaaaaaacaaatataggatttaaagccgggatcatcttagaaaaattaggcgaaaccggacttataaccattgccgagcttgcgagaaggctaaattttgcggctgatgaaaccgcactcgccgccgggtggctcgcacgtgagaataagatatacatcgaacggcgaaacggtttgctgtatatcaggaaagagtgatacaacgtatcaaaaggataaacgataaacgctggaatgtttgcagtgcgtaacactattgatgtaaaagtgcttttcattatccatttgaaaccatttataaacttataaaaaatacaggtatggataagcacatcatcagagagaacgcagggaaactctggcgcttattaagcacagacgtacaccggaaatggaatttgcaggaagtaaaggaattgacagggttcaatgatctggaagctgccagtgcgataggctggctcgctcgtgaggacaagattcaattcgagcttgaacaccacgacactaaggataagaacgcattactataccttatgttgaacgtctatttctaaacacctccctttgaattgtaaaagcctccggcggggttttcgccggggggggcttcttgcatttgcatatataacctcaaaggcaagtcaaatcggacggggtggcggtcggacggctgaaaagtcgaaaacgtaacacaggcgtgttactacttgtctttgacaaggcattttttaggggtgctggcatacaatccgaaaggggcgggaacggctgttcccgtttgttctccctgcaacctacaggatattaaccttaaatcttgagttcaagttataaatgcaacttttaaagaaaaggattaatagctgcataagtaatatttttttcagagagaaaagagagacaattccctctgttctctgctgaatggataaatgttactatctttgtttttattgtccgtccaaagaaataaaagttgtagatgagtaaacatataaccgaaaagcaaaggtatgcaatttctaagatgttgcaagttccgatgagtaaaaaagatatagctgaagctattggagttgataggagtaatatttatagagaaataaaacgcaattgcgatagtcgtagtggaaaatacaaccctgatcttgcccaaagaaaggcagataaacgtaaggttgaaaagaagcgaaaggaggtatttacacaagctatgaagaagcgtgtaaaaaagcttctacgaaaggacttgagcccagagcagatagtgggcagaagccaagtagaaaatatagctatggtatctcacgaaactatatattgttggatatggcaagataaacgacaaggtggggatcttcataaatctcttagaaggcaaggacgcaaatattcaaagcgtggttctaaaaacgcaggtagaggatttattccgaatagagtggagattgatcagcgaccttcaattgtagagcaaaaagaaagatttggtgatttagagatagatacaattattggaaagaatcacaaaggtgctattctaaccattaatgatagagcaacaagcagagtatggatacgtaagctatcagggaaagaagccatccctgtagcaaagattacagtatgggcattacgaaaagtaaaaaacttaatacacacaataacggctgataatggaaaagaatttgcaaaacacgaggatatagcacaaaaattagatattaatttctatttttgtaagccataccactcttgggagcgtggtgccaatgaaaatactaacggtcttatcaggcagtatatcccaaagggtacggactttagtgaagtaaccaacaagcgtattaaatggattgaaaacaatctaaataatagacctcgtaaaagacttggatacctcacaccaaacgaaaaatttaaacaaattattaatatgaattccgttgcatttggaacttgaattcagcaa

SEQ ID NO: 87 - DNA, 1682 bp, Bacteroides ovatus
  source 1..1682: mol_type = genomic DNA
cataactacctgcgcatcaaacgactacatacagctagcaatcaattgaggataagatttgaacaattagtaccattaatatcttttttacctattatgagttatccggtatgcgaatctttcttcgttccactatagttatctttgcgtttgactatagttatccgcaagggtaactatagtgtactttgcggataactatagtggaacgaaaaaaggatagcgatcggaatgaaatcgattagcaaaagaaggaactaaaaatggcagtgaaaaactatctatactatagcaattggtcaagtacggcacggaacaccttatcggcatgttcttgcataatcttaatataattaaagataggacggttatttttcatactgtgtccgatacagtattctattttttcaatttgaatgcctaaatcatatccgtgttgtgcaaatgtctttcgggcggaatagtaagtaacctttttctttacccccgaaagttctgttaccttatttatatgtcggaagactaaactatatatttgtttataagatgaatatttaccaaactgcaaatgcccatttctcgacatatatttatctataagcacttttgcttcaggctgcaaagtaaatacaatttcattttctcccttcttgctattacgtgttttgtgacgcacataacgcatatcgttcttatttttaaaatcatatgctaataaatctctcaggttgataccgcctaaataataggtaagcataaaaatatctctcaccatggataaagaagactttaaaagccggacatcacgtattctcttcagttcatctattgacaaatcaagttcccgcacattacttgtcggcatcttaaagaggacaaaaggatgaatggagtaagatacataattcatcttaccggcataatttactatcacctttattaaagtcagatatattctgatagttgtatctgccagattctcctcgtgaagaactttggcaaatccttggatatgtataggtgtcaattgaattaaaggaaaatcccctttcatatatttgactaatctttcggaagctatcttataaagtttataagatttctcccgctcttctcctttcatgaaattcatgtattcttttgcaacagcttgaaaggttataccttttttcttttgttcataagtaattatatgtataagttcggtacatgaaattgctggtaaatagctgatcgatgtaacaatttcttcatactcattgattagtttccgaagacaggcattcatattcgctgcattctcatgccttactactcgaccattttttagttgattggcagaatccaaagtaaattgggtagatatatatctggtttgagaatgatgtgctacggctatccttattcgatgtctgccatttgataattttttagttggaacaactacaattgaaaaattcgccatatcatttttaggtttataaattactattttccatacaataaaatagaaacaaaaaggttcatagtcattaggtactaatcgaaaatcgctcctacagcatggaatatcgtgcaaaagacggtattttccatgcatttgtacgattctgcattgctatatcttgattaagtcgttatgtttgcaacactttttcacaggtagagtgtgaaaaattact

SEQ ID NO: 88 - DNA, 1539 bp, Bacteroides ovatus
  source 1..1539: mol_type = genomic DNA
ccttaattccgcaacactattataaattaaactttttaagtacctgagcaacaaaaagttgctcaggattttgccatgtcagaattttcacttatcttagtgttgcaaaaaaaacaagagaatccgacgatagacatggcgaagatacaaattaaatctgagagactcactccttttgggggattattttcaatcatggagcaatttgactccacattatcatctgtaatcgactcaaccctcggtctaaggtgtagatcgttcggttatcagtacagcgaaatcatccgttctctcatgagtatctacttctgtagcggttcatgtattgaggatgtcactactcatttgatgaaccacctctcgcttcatccgacacttcgcacttgtagctctgatactatcctcagggcgataaaggagttgacgcaagaaaacatttcatacacatcagatatgggcaagacctacgatttcaatacggctgacactctcaatactttattgctcaattgtatatttgcatctggccaactgaaagagggtgagatgtatgatgttgatttcgaccatcagttcatagagacagagaagtatgatgcaaagcctacatacaagaagttccttggttatcgccctggcgtggcggttattggcgatttgatagtcggtatagagaatagcgatggtaacacaaatgttcgtttccatcagaaggacacgctgaagaggttctttgcgagatttgaacagaatgggctcactatcaatcgcttcagagctgattgtggatcatgttccgaggaaatcgtggaggaaatagaaaaacactgcaagtccttctatatccgtgctaaccgctgcagttcgatctacaatgacacctttgctctcaaaggctggaaaactgaggaaatcaatggcattgagtttgaattgaactctatccttgttgagaagtggaaaggtaaggcatatcgacttgtgattcaaagacagaaacggatggatggtgtgcaggatttttgggaaggagaatacacataccgttgtatcctgactaacgactatgattcttccgtaagagaaattgtcgagttctataaccttcgtggaggaaaggaacgtatcttcgatgatatgaacaatggtttcgggtgggacagattgcccaaatccttcatggcagagaacacagtgttccttcttcttacagcacttatccgtaacttttacaaggccattattcaaagacttgacgtaaagaagttcgggctcaatgcaacaagtcgcataaaagcgtttgtcttcaggtttatctctgtaccagccaagtggatcaggacatcaaggcggtatgtgctgaacatctatacctgtaataatgcttacgcagatgttttccagactgattttggataatgcctacaacttatgggaatgatattgtgtattgcctcaagtcacattgtggggtaaggggatattgtaggcagaagtgggtgcttcaagttcaaattatctgcaaattcagtaatg
